United States Patent Application Publication US 2025/0205292 A1 - sequence listing, part 8

SEQ ID NO: 10 - DNA, 3323803 bp, Lactobacillus plantarum (residues 1,661,903-3,323,803 of 3,323,803)
  source 1..3323803: mol_type = genomic DNA
cacttgatccgaccacgcaaaactattacgtgattaaagtgacaccgtactttgatcggacgatggcgttagccgcgcgggcaaccgagtatccgttagcacaagttgttggtaatctaatggtcgggataagtttggcagaggtcaaactgcccggagcctaccgtaaacaaacagctttaattgaacccgttttagatcatattgtttgccggataccagtttggccgtttaatgtgttgaagaaagttagtcatcaactagacaccgtgacggaatcgacaggctcagtgatcggtattggtcgttcaacggaagaagccttgttgaaggggttgcggtctacggacgaatctcgctatcacgtgattgctaatcgaccccagaactattcggagggtgaactgatccaacggttgattcatccgcaagctgggcgcatgctgattttacttgaagccctgaatcgtggttatcaaatcgatgaattagccgagctaaccaagattgatgctttttacttttataaactgagtcatattttagaaattgaacgagccttgcgtgaacggccgtttgacgtccacgcgctgggccgagccaaatattttggctttaccgatgaagatgcggccgctgcctggcaaacggatgtggctaaggttcgcaactttgcgttggaaaatgaaattcaaccgacttttaaggaggtcgaaccgactgccggggaatttactgagcagacgagtacttattactccacgtacgaatttgataacgaaagtcaaccgtctactggtcggcgagtcgttgtcattggcacgggtgctaaccggattggaaccaaccatgggaacgactatttggtctcacaactgttgttctacttgaaaaaggctgattatgagcctgttttgatcaacgctaaccctaatagtgtggcgatgactccacgattggccaaaaaacgttacgttgaacctaaacagtattcggatattttaaacgtcttagcgattgaaaagccgttgattgtttttaccacctatcatgattaccggctgggccagaagttagtacaggatggctaccaagtgatccaaatcaacaatagcttgccgcgcgagcagatcaagaccaacgattcgcccgccgtcgaggtgattacggacggcaccgatgtgacaattttcggggtaagtgaaattattgcgggaaataatttgcgtggcaatgtccgtggtgcggtccaagtatttccgattcgtgataaggcggaaaatcaggcaattacagctttacacgctgaaatcaagcaacgagtgctcgccatgggtgcgcccgggctctatacagttcggttagcgattgctgatacagctttgcaacttgctacgattgaaccgatgagcattgctacgatggcgttaatcagtaaggccagtgggtcgagcgtgacccgactattacttcacgtgaaattaggcgaagcactgactaaggtgatgtacgactatccggatgttaaccggctaaagccagtctatgttcaggcgaatacatttccctacaatcatttacaaatttatgatgaagtggaagccaccggtgaaccgggccacgctaccggcacggtgattgcacatggcgacacgttaaaggcggcgttgacagcgttgaatcagggaaatgaagatacggatttttaggcgtgattcagtacgtactctgatgtttgttgaatcataatgagtaacattaataataaagatgctggctttttcttgagattggtgtgagatagtatttcaagaaaaaccagtttttattttgtcgtcaagctaaattattagtcacgtggcccattgcatatggtatttaaagctgataagcaagtggcttggtgaagtgaaagtagcttttaacactgatagtcactagtatcagtgtttcaaaacggatataatgttattttagagcgcttgataagagttgctcggagatgaaaaagggacattggggaggaagcgtttatgcgtaagaacaaagcggcaattatcgtgattgcacttgccgtgttgttaatgtgtagtccattgttattaaataatcatgcgttactgggagtagatgggtactttcaatataaccgaatttatgaagctgccctgcaactgaaaaatcataattttagttttattaatctttattcattccagcaggccggtcgagttgtgaatagtttatatagtccattaattacctatgtagctggtgggctgttgttactggtcggcaactggtttagatttcaaatcttaactctttttatcgtctattttgtcagtggctatgtgatgtatgcagctggtcgccggttaggtttttcaaaacgggtgtcaatcgcgttaggcgtcatctttttgagctctaacgttgtttatggattcatttttggtgttacatggcgctcaattgcttttggattactacctttattggtggggccaattcttgatttatatgccggtgattggcaactattatctatgttgaaattgggtgtattcattggtttgctggcccaatttcagattttaacggtcgcgttagtattaccgttattggtgccattttttatacgtggtttatggcattccaagtttaatttgaatgggctgttaaacttttttgccggtgtcttattagccttgttgctcagtcttaatacgctgttgccattactggaagtctatcgtggcaacacgctaatttcaccagttgcgatggatttagtaccgaatgccagtttgattttgcagccaatctacaatggggtggcttctaatagtgatattgtcttaacaatgattgcttatgcgatgctcacaggattgattgttttctggacccggttaggtgcgttcaccaaattattttcttgtgtcgtgctagtttatattcttattggaaccgggctatttccgtgggactcgattcaaaagtcgatgccttacttgcaatcgtttttacaaatgccacgacgaatttctttggttgggacaccattcatgatgctagcaacggttatgatttatcaggatgttgcagctagtcaaaaaagcgcagccctgcataagggaattgtgattgctggaacttttttaagccttttgtcgttacttttatgtacgcaaaaggttgctcagaatgttcattatacgattattgatacaactccgttagcagcaggattgcagacggcagacgataatgtccattctaatttgaagtatattaagcaattacaaccggcctttcatacacgacatattaatcagctaattgagcaagttgatcgcacgacgccggattacattccggtgacgcagaaaattgaaacccatagcaatgtctatcgtgcataccggcgtaacttttcagtgcaacagtccaagttcaaacatcaagtcattcataatggcattcagttgacttggaatgcgaagcacactaaaatgcgtgccttgcctgtagttgcttatcgacgtacggtgctaactttgaacggtcaccgggttacctctgaacaaattaagcatcattggataggtaacttgagtctaaaacagcgacgtggtaagaatgtgctaacggtaagatatgaagctagtcgcgtcacaacattaggaacgaagcttgctttgatcgcatgggttggtgtattagtggctgggccactgcttgtcaaacgtgcacgtcgatttttagtggcttaatcaatatatttgtttaaagcacggccggataccaatctggccgtgttttttggctgttgagatcgtaacgaaacctagttgctcggctttaaatagcgctttcatttatggtatgcttatctaaagacaaattaaaggcaggttagttaaattggcaaagacactatatatgatgcggcatggtgaaacactttttaatcggctgaagaagattcagggggcgtgtgactcgccgctaacccccaaaggaattgcggatgcccaacgcgtgggtgcgtattttcaggcgcaagggattacgtttgatcatgcgtacagctcaacgcaggaacgagctagtgacacgttagaattagtgaccaagcaaccttatgagcgtttaaagggtatcaaagagtggaattttggcgttttcgaaggtgagtcggaagtgttaaatccaaaaccggaccccgtgcgccgcagtcatggtgactttttctgtcagtacggtggcgaaagtgatttgcaggtacaagaccgcgttgtcaaaacgttgacggcggtgatggcacgtccggatcatcatcaggtgttggcggtcagtcacggtggggctagcttcatgtttttgcggcaatggctttcaatggacgaaattgagcggcaaggcatcgtgttacataactgtgcagtcatcaagtaccagtatgacgcgggccgcttcacatttgaaaaaatcattaatttggctgcaactgataaaaattaaaattatgtcaactagatttaagtgcgttgacaatcagtctgagtttaagcattaaaaagcgctcacgactcggattcaggcatgaaagcgaggtcgtgaacgctgacgcatcaagggcgccaaaaggtcgtcatggtttgtttagtagtcatattatattgaatgatttctgcaagtagcttgtgattgattggcgcatcgaaagcaacttgccataacatcttggttgttttatcaccagcagccgtgatcgcgttccgatagctatccaaagtatgtgattcaagtgcaatgttcagatgatccttggcggtactgaacccaatgataaatgtgttgtggtcagtaaacatcggttgattccaggcgacccgtgccttgagttgtggaaaagtcgtgtgtacccagttgagcaaggtaatcagttgggcgcgatggggtgttgcacccagcttttccagatatggtgtcaaaacagctaggtcagcgtcaaggtactcagccattggcattcctccattcattgatggcttcagtgtaccggatacccgcagagcttgcaaccaaaaataatcccgttcaatcaggtggcccacacggctgatcgaacgggattatttttaataccgcgcatttgagcccactacgattcagtgcacggttcgtttttattagttcattaggttccaatgccagtaaggatggcgatcgactctataaatgacagctggatcagcactccgaggccgcggttgtttcactgtgatcgttaagacttgtgaatgacgcatagacatcagttcctttcttaattaatatctttagtttacccatttgaagcagactcaactactgcgttttcataaggctagcataagaatttcttagaattgtactggcgagggccggcactacttggacagtggttacggtgtggttgcttgaagaaaggcataatctgatgagcgaacaagcaccggtaaataacactgattaagctagtggctcattcgcttcaaaaaaagacctgacgagcggtgtttaagctggataacaaatgcgcataacgggcctcgactatatggttaggctaagtattgtgttggttgttcccaacatgactggagttcattaaaaaaatgactgagatgatcgccatcaatggtggcatgattgaccgtaatgcttagcggcatgattgttttgtcagcgtccttcttaaactggcccgcctgaaaaattggaaagaaactatctagtggtttgaatgggaggggcgtgtagctactaaagtggactcctggaagacagccgatattaaccagattaggtgtttgtggtgttttcgacatgggccctggaagtgcactaaattcagcttggtctgctaaatagtgttgatagaacgtttcaaaatcggtgtcgtaagtcgtccataaattggccattgtccggtcagcgtgtaagatcgtataagatggatgtaacacgtcaaaggtcaccagttgatcgttcaaatagccgatgcgcatttcgggatgtgtggtcaacaagcgactcactaggtatagatataccgcgttgaatttaacgtggtgggctttagtccaagctagggtggcggtaatatccatatttaccgtgagactaaaaccgctgggggctatcttggtgaaatagtaaaaataagtttggcgcggccaggccgcaggattaatagcaacggcgtgcatgtttggtttagtggtggtcatttagttttccttccaatctttagggcgctgattatagccatggtcatcgaatggttgtaaatcgtgcagccatttggttttgagtgctttgagcgtggcacgcatattagtgacatcggtcgtttccttttgccacagaatttgatatgaaaagtcagcggcagtttgttgattccaatcagcctgtaatgggttggaccggtaaaagtttttattgagatttagttgataaaaggcccagcggttgtgtaaattgggcactgtgtcaatccaaattttatgattgcgttcgttggtaatttgaatgacgccgtaataagttggggcaagtttgtatttttgctgtaagcgatgtttttcgactggttgcatggttcagtcctccttagtagttgtgcgccagtattgccggccatcgacggtacgctttaagaagccgtagtcgatcaggtaacggcgcagcgtggtgtagtcaaaataaatcggtcgtaaatagtggttgagctcgtcttcattgattggtcggttcatcggaatttcatcaataatccgcgttagaatggtgacaatcgtcttttgctttttgggccaccgcttcaattgtagtgggtcatgatcaaagttgaagtactgcttcaatgtttgggtaacttcgtcttcagtaatcgcaaagcggtcatcaataattccgggttgttctggcaggacaatcaaatcattaggcgtctgaccactctcaaagacggattgatagatggccaggtacaatttagcttgtttggctttttcacgaaatgtaaatttttgatgtcgaatcgtggccgccgctaattgaaattgtttagccaagtcggcatccttgatgccagtcgcaaaagcagtcagtaaattttgctgtttagtggttaaagtattgtagcgactcgctaagtgaatcagtggtgactggataccaccatggacgatcgttaagtgttgttcgatcgtggccgccgctgcagtcgtttcccaactagcatcacagtaattacaataccgggcagtggctgtttgatgccagccgcgttttaaatcatcaatcgttaaactagttaagtccatgaggctacctccaatgttactgattataagactgtttactgtatttgtaaacacaatcgatgaattaatgtttactaaaatagtaaacttacaatcatctgatatgtttaccgttacagtaaacgcttaggtttgccttgacaccaagatagctagcgcttacgcttaacaacgctgtttaaacgtgaaaggacgtgggacaatggaaacttatcaccgtgcatttggtgtttatgggattattggcgatgagcatgcgttggtcgttactaaaaagtttggtggtccctatacgaatcgctacgacttaccaggtggcagtttggccgatggtgagcccttacttgccgcgattcgccgtgagattcaagaagaaaccgggttaatcccgactgaattgacgcaattgggtatcacgagttttcggtatccctggcagttcaagcagtggcggatgaaccaacatctggcggtcttttaccgagtgacccggacaactgggcaactggctgaacatgtcgctaactttgatggtcaagattcgcatggagcatcacgggtgccgttgcatgcgttgactgaagctaatgcgtcaccgttggttttaaaagcaaaggcagtgttgttatccgggcggtttgacccaagcgatcagacctacccggactggaccgtgctggatcatccggtttattgacctgagctaatcccggaatggcgccaaaaatttcatttcaaaagcgaaaaataggtgaacactaggttggcaatgtggctgatctagtggtcacctatttttgattcatgcgcacaactaatgcgtttaagcgggcgtgtggcttagtcctaatgtgacaaaaatgacgacgttgattggttagttaatcgtcgtttcgcgtggtgggggttaaaagtaccaaaatactggtgtgcgcccgagaaaaccaacatttaaatgaatagcgagctataattcagtaacgtctgaatggtgatctttcctaggcagggttacttatcgtttaaggagggacgcaacgtgtcgacagcttatgagaacgtttgccatcttgaaagagaggggatttaaatggccgatgcaattttaaccgttaaacatctgaataaaagttacggccaccagccagttttgcgtgacgttagttttgaatgcacccagggacggatcgtgggcctggtgggcgcgaatggcgctggaaaaacgacaattatgaaagcaattttagggctacttagcacggatggtgagattcaaatcgcaggtgaatcgatgcaattcgatcatcatcccatcttggcgacggtggggtcactaattgagtatccgagtctttatccgtatatgagcggttgggacaacttgcgtttgtttgcggacgggcccgacgcccaagcgcaattggttggtggtgaatttctcaatacgtggttactgctaagtctagtgctgctaattgctgctcttttcaagagttctggtgcggcagtcgcggtcggaatcatcggatactttgttctgggaatggttaatattcccatgatcgcactcattcggaagtatacgtggctcaaatggaacccactcaacatgttcaacttttcagcccagttgggattaccgacgctgagtaaaattaccaagctcacggatgtccagttgttttggggcaatcttgcatacattattttattcttagtgttaggcctgctattctttcggcggcgggaagtttgaaccgttaccgtttgaagcactgccagtaagtactaaaaatcgcgcgtccagaaattttatcttggacgcgcgattttgttggttaatgattgatcactgcgtactcttaaaaccagtttacgcgtgcggtgtcagttgttcaacaagctcagcattgggagaaacgtacaatgttttctgaccttcatagatcacaaagccaggtttggcgccattgggcttgcgaattcggcgaacttggacgtaatcgaccggaacggttgctgaatcgcgggcttttgagaagtatgcggcgagattcgcggcttctgtgagcgtttggtcactaggatcatctgaatgaatgatgacgtgtgagcctgggattttttgtgtatgcagccaatagtcactcttacgggccgttttcaatgttaactgatcgttttgccggttgtttttaccgacaaagatcggcgtcccgtcactcgcagtaaattcctggggttgactcggtttacgtgaactgcgttgctttttcttagtcttgtgttgctttaagtagccttgttgcgtcaattcttcacgaatttcggtgatgtcagcgggactagcaagctcgatttgggtctggatattgtccagataatcaatttcagcttgggtcaagctgatctgctcaccaacgaagccaacggcatttttttgcttctgataacgtgaaaaatacttctgcgcgttccgggaaggcgagagctgattagatagttgaatctttaacggcgcgttatcgtgataatagtctggtaaagtaatctcagtcatcccacgtttgacttcatgtagataggtcgttaggatttcaccttttaaccgcagctcatcggcctgcttggtgttagctaaggtcttttctaactttttgagcttattacgattcttcttcagattatttttgaccacccgaattagattaccagcttgttgttgaacccgttcccgttgggccgcgtctgcataataaaaatcaagcagactgctcaacgagtcgaattggcgcgtggctttgccaaaatggtcaaacggtcccgcggcaaacatggtcttatgatttggtaaggtgatcaacgtcgcctgcggctgatcaaactgtgccaaaaaggccagataatggtgatcaaggtcgccaggctgatgcaagtcggcagctaactgttgcgcgctatcacggccgaatccttgataatgctgctgcaattgttttgccaacacgtcttcgttggggtaatccgtgactaaggtgtgaaaatcagtattcggtgtaaatgggtcttgtttgtcttgcttggggggctcgatgtaggtcgcgcctggtagaagtaatcggtagcgattctgatccgcaccgacatgcttgatgacgtcaatgatcttaccagtctgattatcaactaggatcacgttactatgtcgcgccatgatttcgataatcaacgtcaatgtctcggcatcaccgagttcgttacgggtcgtcacggtcaggtgcacaacccggtcgttggcgacctgcgacacatcggtcacgatggcaccttgtaaatatttacgcatcatcattgcgaagttcgtcggcacggccggattaacgtaagggatttgtgttgtctgaatccgcgggtacgtcgggtcagccgatagtagaactgggtgattcttccggttggcacgaatggtcagaatcaactcgttttggtatggctgattaatttttgaaatacgaccgccaactagtgtttggcgtaattcggtgaccatggcatgggtaaataaaccatcaaaggacatgtgatcactcgctttctaagatattcgttatcactgtaaaaatacagttaaccgggtactagtataccgtttttgaacggttaaaaacaagttagcgccccgcgctgacgcataaagttagttgccaccgctgctagttgtcaaacaagcaattagcggatgaccgctttgaatctaaaaatgttatatgcaaaaactactttaacggtattttaaataaaaagtagtcgtaattacacactctatattgtataatacaaatgtattcattgtgtgtgctgctattcgcataagtgatggttaaagcgtgctaattacgatggaatcacactggatcagccagtttacgctgaaacgtgcttgcgtcagcgaagctcagttgagtctttttgcttctaaaaattgggacgtttttaatcatcaggcggggtaaatcaagtcacaatggaccgatgtgaattattgttgagaggaatgaactgtcatgaagtcaagtttaacggccttagcggaaaccgctaagttgcaaactgccatgttgaaaaaaattactaaggcccaaggaatcaccgttgcggaatggcaactactgatccaattggcggcgggggccaatacgcaagaaaaattggcgacagctatgcagcttgatacatctacattaagtcggcaactggctagcctagtcaagaaagaacgtttgagtaaggaagcgattggtcgtgaccgccgccaactcgtttacacggtcacgccggcaggaacagcggcattgaccaagattaatgcggattatcaacagtttgaagcagaagtttttgacaaatggccacaagatgaacaaaaccttctccggattctgctcaatcggttaaacaagtcagttagccgaattctcgagccatgactttccaaacggtcgaaggtagagtataacttagttttatgctatgatatttgttattatttaaatgagaagtaggtgtaagtcatgaagattgctgttgttactgacagcacgagctatttgacaccgcaagaggtcgcggacaacgatattcatgtcgtgccgattccggttattatagatggaaaagtgtatcaagaaggtgtcgacattaaaacggccgacttttacgcaaatatgaaatcatttaagtcgttcccaagtacgtcccaaccacccgtgggggaaatggtggcattctataaccgcttgggagaacaaggttatgatgcagtcatcagtattcatcttgctagcacgatttccggtttttataatagcttgatgaacatgcgagatatggtcgataatatcaaactttatccgtatgactcccagattacggtccgtctgatgggctatttggcaattgaagccgcgcggatggctaaagctggtcacagtgttgaagaaatcctggcacgcctagatgatctgcgggcctcgatgggcgaatactttatcgtggatgatttgcaaaatctggtccggggtggtcggttatcgaatgcgtcagccttcattggaagcgtgttacggatcaagccactgttgacttttgatgatcagagccatgaaatcgtcgcctttgagaaagttcgctcaactaagaaagctttagcgcgagttgagcacctctttgctgaagcacagtcaaaagtcgactatccgctgcgagcaattatcgttcaggggaataatttggctgccgctgaagattggaaacaaaagttacaacaaatttatccagacatgccgatcgatatcacgtactttggtccagtgattggggcccatttaggtgacaagtcattagcgttagcctggttgaaggacattgataaggcctactaaaatgaaaattattttttcagcatcaccagccaatcgggcagcggcctacgcgttacgtcaggctgtatttgttgaagagcgtggaatcagtgctgacgttgaatttgacgtcaaggatactgatcagcgtgaatacgctgttctatatttacagcctgatttaccaattacaacgttacgcttagaaccacaagctgaccacgtgatgcgatttggtcgagtctgcactcggaaggcctatcgcggtcatggttggggtcgtcaattattgacagcggctgaggagtgggccacgcaacgtggttttactcatggcgagattcatggtgaactcactgcccagcgcttttacgaactgtgtggttatcgagttacggccggcccgtatgatgaagatggggcccccgttgtgattatgcataagcaattattatgattcaactcgtagcgttggcattttgccagcgcttttttagggttttgccgttgactaacggggacaaaaaacggaaaatggactaaattaaacaagtagtggaggagtggcgcaatgattcaaaaaacgagggccgaacttaaaaccgaaattaagcaactctttaaggggcgttggaaagatgccatcttattatgtattattattagcttattaacgattttcggggtgatggccaattattcagatcgcgtgtcgtcgggcagttccacgactgacgacacggcttttaagcagttggggaccctgactggttctgatatatcgttgattttagctgtaatagctgggtttttactggttcaagttggtgtctggctggtcgttcaaatctttcggattgggacgagttatgcgatgttggactgggtccgacaaccagaacgccagatccatccggtcagtgactcaacggtcgggttcacgaaacgttatgggtgggcactggtcggtctgattatttataaaactgtgcttatcttcctatggagcctgctattggtggttccgggtattattaaggcgtacgcttattcacagactttttatgcgtataaggacttgttagctgcaacacctgctggtcaagcacggccacgctatcgtgatgcggtcacccgtagccggcagttgatgcacgggcacaagtggcagttattcgtgttgcatttaagctttttgggctgggaacttctcagtatcttaacggctggaatcggccagttatggttggtaccatatatttatggtgtacttgccaactattatgataatttacaagcaattaattaatgaacgtcgatattaaaaatcgacacaaataatattgtttcttttattaagcattaagacaagcccgccaaaatatggtaaactggcggaagcaagaaaggaagtgcgatagttaatgcctgaacaaaaacagacgcgcatgtcacgcttgaaagcgcgagaggctacgggtggcaagcggggacgtaaggcgagttcacagggatcccatgcacctaaggaaccgaacgatccaaagaaaccgcaagcacctaagtcaccgcaaaaaaaacatcacgtttcgttatggctattggctttaatcgtgattgcgctcggtggaacagtcgtttactttgtcaaagcagctagcaaccaagacttagtcgaaaccacgagttcctcaagtagcagcaaggcgcgcaaaaaatcatcttcgaagaaatcatctagctcatcgaagaaaaagaagaagcattcaagctcaagtagtgaaagtactagcgaaacgacggctgcaagtacggatgccgacactagcacagatgggacagaaatgacgggtgcgtatagcagttcaactgccactaatacgaccgctggcaatacgacagctagttcgcatagcacgacggccagtcatcaaacgaccaccagtagtgccacctctcacagtacttcaacagctagcagctcatctaagagtgagacgtcatcaacgagtactgagaagagcagcagtagcagtcactccggctcgacatacgataatttagatgacgcgaaggactatggtgaaaactcgatcagtgggaactataaggtcacgacggatagtaatggctcgtaccacgtgtcaaaagctgattaattttaattgcaatcatgatgtttgagctgggcttttgcgaccgttttcggtataatagccttaaaatgattgtaagaagtgagtgataaaattgaatcacaattatgtggaagttaagtatccagccatttttcgtgatgaaggcacctactgggatgtccgttttccagacgttcctgccgcccagacctttggggcgagtgtccaagttgctgcggacaatgcggcgaacgcgttggctattgcgctctttgaacaatcactcccgccggcgtcggatccgcagtactggcggttggcttcaacggaatttgttgtttggatcacgatggcggatgtccagtttggtccgggcgctgatacaccggaaccaatgaactaatgcgtataaaaggtaaacgggtcggcacctaattggtgtttcggacccgttttcttatttcatgaaagaagttgagaaaccttgccaaaccagccactaatctttgatacggccattgcgaaggataagccagaaaatatccggcacccgcacaatgcctgtcctttttgcgatccgggccagttgactgatattatcgcgcaagatgcagatcgtatctggctgttgaataaatttccgaccttgcaagctacctggcaaacgatcgtgatcgaggcggcccgccatgatggcgatattgctacttactcatccgcacaaaaccgcgctgtcttcgcgtttgctctgaagcactggcaagccacaattgcgagtggtcggttcaaatcggtgttgtgctataaaagttttggcccacactcgggtggaagtttacggcatccacacatgcaaatcgttggtttaatggccgccgatggttacgctaacgtgacagcagccaatttgactgggtattcagtgttggcggtcgatcaggtccaagtgactgtttctgatcggcctatcatgggatttgtcgaaatcaacgttgctgctccagctaccgcgattgcaccgttagccgatgctgtgcaacaggtcgtccagtatacgctaaatacgtattttcatgggcagtgtgatagttataacctatttttctatccgcgggatgaccagattgttgccaaagtggtcccactatttaatgtctcaccatactatatcggctatcggctggcacaagcagatacgccaaagcgaatgcgcgccatcgctgaggaaattcggcaacagtttgaacgatcgaatctggctcactcaaactagctaataggccgaacagccccaaacgacggaaaaggcccccaggaatcctttcgattctcgggggccttcactttaccgttcacgtgcatgattaatggtgacacaattgcgattagtatctggttgcggggtggtcaaaaacaaccggtcaagtcgtggaggaacatctctcagcagtaatgtcagtgattagttatggttttcaatgctggacggcccttcgccgggcatagccgtaaagactcagcaaggcgatcaatgtcagcaggccacagctaccgaaagtaacggcaaaccccacccgttgaattaaccagccaatcagaggaaaagcgctgatcatcgctaaactaaagaccatgctggcaacgctcagtagggtggcccgttgcccgtttggaatcagctgattgtagtagttggaaaacagtggctcaatcagtgccatcaaactattgatgactaaatagatgaggaccagtagaccgatggcgtgactaaatgcgctaagtagggccataatcatgcttaggcagagcccgtaaagtaactgatgttgggtttgatgtcgctgtagccaaggtgtcagttggatcgccacaatattgagggccatactcgcaatgaggatcgtcgtgattagtctcccactaaagtgctgagcagtcatcactgtttgaaagtaatagtaataagttgttccgagtgccgaaaagagcgcgtcaaagatcattaaaagccgtaaacgacgttgggtcactaacagatgcgcggcagcacgaaggatcgttcgtaacgacggttgtgttgaatgagtcttggtcaactggcgctggggaacgtgcagcccactgattgccagaatggcaatgagagctgccgctaaatagacccagtacgtcactgaaagatgctggggcattaaccagccagccaacacgacacccaacgtatcggccacttcgattgtcgtgttgagaatcgtcgtgacgcgtggataatgttgcgtggcctgagtattgacgagactgtcatattgtgccgcttcaatcgtaccagactggagattatacgcccaggcttgtaggatgaatgctaggagcaaccagccgagactgtgagccgtcaacatgatgagggcgtgtccgatagccatcaggcggctaatgatcaggacaggccgataaccaaagcggtcggcgataacgccggagggaacttccgagagaaaactagtcagatgaaaaacactttcgcatagccctatctcaacgagtgataggccttgttgctgtaaaaagatcacccagagggtgttgataccaaaaaaagcacaggccgcataaccataactgagggttaggttacgacgggtaagtggtgataacatgttggactcctttagcggccacgagcggacaaaaaaagacgacccattgtcgtcagctgctcgtgactgcgcaatggctagtggtcattcaacttggaaaaagcgcagactgcgcccctgacataaccataactgcaaaaattgtgcgcttaaggttaatccaagctaaaaatttagccaacacgtcattcaccactttctaataatctcattttcttatcataacaataccatatcaatttctgactgacaactggtaccgataagtttgaatgcctgatattagttgtgattgtggtatgatgttaagtaaatgaacaaaagtggaggaataatcatgcaaaatttgattccaggagacatgttggaagttaatcaaaaacttaagtgggaattagacgcgggaatgactgcggatgaaagtagcgtgattaatgaagctgtgctggcgggaactcagtacttcgtcgatgaggccttagaaggtagttactggacagttaagtgggctgcagatggtcagactatcgaactctatgggacaactggcaccgtcgttggccgcattaaaccgctgtctgccacgttagaaaatgattttcgacaggattcacaaggcttatttatccggattgaaaaagaggtcgcagtgattgttcgtgataactaagccgaattgagtaatgaggtgattagcatgtttgatcaagatgaagaacggtttgcaacgctagggttagccgccaagctaccgagcgcggtgattgatggcatttgggatattattgatcaaaatctaaagggagtcgttcgcctgccacgggtcctgcaatttgccctgatcgcacgtaatgggcaagtcaccgtggcctttgatgcgcagcacgatgccatcatggaattcgatttaccagtcaattaccaacgggagtttcccgagacggtggcagtcttagacgatggtcagtatcagaccatgatgttgatggacgaactctccgtctgaacgcagcgattattcaatgagctgaatacgaggaaactcgtcacttcaggtcggcgaataatcgctttttgattggtggtctttaactgggcagatgcgccttaaatttgtataattaaatagatggtgtgaggtgtggttttgcgatgtcaggttccggttgctaatcaaggaggccgcgttgttcacgtaattctcacaccgggatcagagaaaggtgtgtgtctaatggcgaaaacagcagcgtgcattgtcgatcaacaacgttaccaagttgtggacggtatgcgattagaagaattggaaactagtttgcggcaaatgattttaaaagattttccgcaggcccataatagcagtttcatttgtagtgagcatctcgtacattatcgcttagcaaagatggatgcgatgatcgagaacgattatcaacaaaatgataaggtcaatgcgcaattatctaagattctcgctaaccacacgtatcgggtcgtcgatgttaatagcgagctggaaagttcattgacatttggtcaacgggtcgcggatggggtcgcacggttcggggggagctgggcgtttatcatttcgtttgtcgtggtgatgctcgtgtggatgttgctcaacgtcttaccaatttttagccatcattttgacccttatccctttattttattaaatttatttttaagcatggtcgcagcaatccaggcaccattgatcatgatgagtcagaatcgggcagctgagtatgatcggctacaagcggccaatgattttaaagtgaactcgatgtctgaagaggagattcgggtcctgcactcgaaagtcgatcatttaattcaacaagatgaaccaaacatgcttgaaatccagaaaatgcaaacacaaatgttaggtgagattcaagcacaagtcaatgaattacgacgattgcaaccgcggcgacgtcgcaatcaaagttaaggtggctgattgagtagttaaccaaaaaaactgagcgcctggaattttcacattccgacgctcagttttttggttaaccgtgaccgcacaacggcattcaacggcactcgtcaagattgccaacggtcagtggcactatttatatttactttctaaagcactcatccagtaccccagcgcgattcccacagcaagagctatggcgctgaataggtaggtactgagtgtggcatgcgcatatgagatactctcagccgcatatggattcggaatcaatatcagcatggtactagccagaacaatacctaatatgaaatggtagactcgggaatgaaacttcactaataggtgatccatcaacttcgagaacaacgccatcgccaggatgccaccgatggcgatcggtaagtagacgcctacgatatctagtcttttaaagcccgtcagcatgggtgtgaaaaggcctaaaataagtagcaagttggaaggactcagtcccggcactaagacgcccaaggcaatcagcgctcccgcaacgatgaaaccaccaaagttagcgggcaaggtcccaaacagctcactcataaagtaaagtaggccggcactaataatgaaggtcccgaagaaccaaactccgtcgagccagtcacgtggcgcccgactagttgcagttttcatcagggctggtaaggtcccgatgatggcccctgcgaacccccagagaacgatcacctgagcgtgtgcaagtaagtattccagcggggcggaaagcagggcaatcccgacgatgcctcctaatccgacggggacaaagtaccagaagtcccgtttaaagttacgacggaagtgggccataaagcccaacagtcgctcgtaaataccgagaatggcggcgagaaccccacctgagacgcccggtaaaataaaaccgagggcgatgacgacgcccttgaagaatcgtttccagaaagtatcagttgttttagttggcataagtaaactcctttagctctaatgactggtattccagtaataatcaaagtaattaaagataccagaaaaaatcctgcatggcaattaaaacccgttttttacggtttccttcggtggcaaaagttgcacggcagattattttatcataaaatgaatggacgtgaaaaaatctgtatttttatgaaaattattatcaaattggattaaaggaaagttgaggtcatatggaaaatcagcaacttgcccgtaaactaaaacgccgtcacgtgcagatgattgcgcttggtggcgcgattggaaccgggctctttttaggctccggttcagcaatcaaacaggcggggccgtcgatcttgttggcttatgccattggcggtttcttctgttacttgatgatgcgagcactgggcgagctattattgtcggatacgcgtttacattcgtttctagaattcattaatcgatatttaggtaaacgtttcgagtttgccattgggtggacctattggctctgctggatcagtttagctatggctgacttgactgcgagtggtatctacattcgttactggtttccgtggatcccgcagtgggtgacacccttaataattattttgattttattagtattcaatatgctctccgtcagtgcgtttggcgaattagaatattggttttcaatgattaaagtggtggctatcattgctttgatcgtgacgggggctatcttgattggttcatcggcccatgtcggtgggcaaacggtctcggtgacaaatttggtcagtcacgggggcttcttcccaacaggcgtccagggcttcttgatgtcgttttcgctcgttatctttgcgtttacgggcatcgaaatggtcggaattacagctggggaagccgaaaacccagaaaaagaattaccacgggccatcaatagcttacccattcgaatctcattcttctacgtgggcgctttgttcgtgatcatggcaatttatccttggaatcagatcacgaccagtcagtcaccctttgtgcaagttttcagcgacgttgggatcaaagccgcggccagcattatcaacttcgtggttctgaccgcggcgctctcggcttgtaatagtgccatcttcagtacgagtcgaacactatttacacttgcgcacggtgacaacgcgccgaaatggatgggaaaggtcaatcgttacaacgttcccgcccgctcattgttattctcatcattgatcttactggtgatcgtggcgttgaattacgtgattccaagtaccgtcttcacgttgatctctaacgtggcaacaaccaacttcatcattgtttggtgtgccttgttggtgtgccattacgtttacaaacgaaccactgacagtacgcataatccgtttaagctgcccctgttccctgtttccaacatcgcgaccttggccttctttatcgcggtgacggtcgtcttgtgctttgatcaagtcaaccgttgggcagtcatcggttcagtcgtttggttcgtcattttattagtcatcgaacgaagtatgcatcgcaccgtttaaaaacgataattgtaatcaccggtcatcagtcttggtaaacccaattagtttaccagctaatggccggcgatttttgtaaggtgcaataatcacccctaatagtgcattctattctataattaagtcaaacatcatggacgttgctgacgaccacgtatcagccgtgacatgattattggggaggggaacagtatgaattatcgcaacttgctcgtattaccacttgccgtcttgttggtcggctgttcatcaccaacacaccaggattccaagtcaactagtcagacgaccacgagtgccaaggcaacggttagcagcacccaaaagaaggctaaggctaccagtagtactagtagtcggcctcaaaccgcagccacgcgctcgtctagaacagcgcgtgagcgggccgccagcgccgctaacaagtcggtcacccagcccacggctacgacccggctggcagcattgaatcaacaattgactaagacgttgggaaagcaggcgctcgttccacaagtcgatgggttaactagtggcagttcgaagttgaacatgcgctattcaggtgacgcagccaattacaccatcaattatagtgtgggacaacaggcccagccattcaacgcggcggccgtggtggatgaaacggcttatgcgactgtcactaagacgacctatgcgacaactaatgccgcggcccagcaggtgggttatcgtgataataaatccacagcagggctgccaaccgtcgatctcggtcatcaaatcaccgcgcatatcgacgcgggtgctggtcaacgatatatcatgtggaatgagggccgctggtcgttgaccgtgcatgcgaacatgatgcacgaagatgcgggcgtcgcgttagctaaacaggccgtcgctactttcgagcaggtctacttaccagcaccacagtcggtcggcgccatcacttttgacgcgatttcgtcaggctctggacctttagaccaagttatccaatggcaagctggtaaagtggtttatcaagtcaaggctcaagagatggcaacggctatcaaaatggctgccagtatgcaataatcaataactagtttctacgctcgttaaattaagcagtgagctgataaacaaaagtagcagcgtaatcagccagagatggctagtacactgctacttttgttggttaggcgttattttcatcttattcgactgccagctggtgaatcgcgactattgatcagtcggagattggcgcagttgttgttcgatgggctgcgtcgcttttaagataagtgcttggtcactcagcgagatgatacggtggtgggtgatcacggcagaatcagttaatgcttggtaaacagccgctgcaaccacccaacaagtatctgtgtcgtaatcacgcgcatgcagtaaatcataaccgtcactcatatctaggtagacttgaaagccgatacctagccgcgcctgtaatcgtttcgcataacgttgataaagcgcgcgattggcctcagggtcgggggtcggcccgataatccgttcaccgagttgtaagtttggcactaagcgcacttgcatgtcggtgcctcctttgcgttgaaaattataatcctattttagtctaatccattcatgaaataaaggcactaatcaaccgcagttaaggtgattagtgcctttatacgcattcagttaagctactagacgtaatagtagccacccggcaacgccaattaacagggcgtaacccagacctggtagtagtgttttacgtaagatggcgccttcttgaccactcaggccaacgactgagctgacagcaacgatattatggacacagaccatattgccggctgccgcaccgacgagctgggctgccaagataatcgtgggcttcaaactcgcattggccgcaatatcagcttgaatttgcgcaaaagtcagtgtcgagaccgtggtactaccagttacgaacgcccctaattggcctaggaatggtgccatgatgacccaaacaccagctagataggtcgcgataaacttggcgatatacattggcatgctaggtaggttggcctgattcaagccagaattagtgaagacttgaaccatgatcagggtaacaccgagggcaattgcggtgttgcccatcgaacggatgaccgaatgggcagttggtagtaagggttttaatgaacgggcttgtactagtaacccaatgatggccgctaccgccaagattgtccctggcgaatagaggagttcccaatcagagttgatttgactataacctagaatgtgggaccacgataagttagcataacgggtcaaaacctgcttgatcggtgtcacgacccgactagcgagtaatagcacaacgaccagcaggtaaggaaaccaagcggtcatcaggttcatcggactaggcgcaggcgtctgggctgccatcccgttcgtccgccatggcgtcaactggctcgactttggtaacaaccagtgcaatcggatcgtgatgatggcaataaccagcgttcccagcggtgcgatgattgaaacaaattcataacccactagccaagcactgaggagtgccagtagactgtaaacgaaaccgatcactaacgcccaaggtaagacggaaagccagcttttcaagcggtgtgccttagggccaaaccacatgatgagaattaaaatgagcaccgctggcattagcgcaccaacgaataaatcgagttgcgtgatgcgcaggccaatcaagttcaagacggatgctttttcggtcacattactcagtcccacggtcaatggtgttccaacggcgccgaacgctgcgggggtcgagtcagccactaaggccaagataacggccgccatgggtgaaaagccgagtgcaattagtaatggtgcagtgaccatcgctggggtcccgaagcccgagacaccttcaatcaagcccccaaataggaaggctaccaaaacggtttgtagccgcatgtcagcagacaaactttgaaagccctggttaatccggtcgattgcaccagtggcacgcaaacagttgagcatgagtaaggcgccaaataagatccataagatggggagggctttatgaatcgcctgtaaaattgaggcggtgaggaccgttggactaatctgccagaaaaagtagccggtaataatcaccaccagagcgctaatggtcattccgcgggtcgcggataaattcagtcccccgagaagaatcagtggcaggatgattgcagcacttgcaataaaaatcatggtcgtaaagcctccttagatggtgcctagtcgtttgactgtgctcgtttgaaataatactgaccgtagagcgtgaccagcgtaacaatcagagaaatcgccgttaagggccaaaccatcccgactagataagtgttcttcaaagcggttgaagctggattgaagaaattgagcaagtttaattgtcgaaaactgctaacaattactaagaggccgaagaaacacagttgacaaagcaggcccccataagtggaaaagcgatatttatgaataattgcgagatctggatcatcaacctcagtggcataaacgctagtattaatggctgggttttcaaaaccgacgtacaatgagatcaggagcaaaccggcaacgtataaaacgggttgggccgtggcaactaacaaatggccgacaatcaggccaccgcgtgcaatcgtggtggcacgatgtaagtcatgctgtcccaataataaatatagtggccggccggtctcaaagcccaacaaatagatggcgaagaccaggtacatccccattttgccaaagacaaagacaccgaagaaactattaaacagtaggacaaaactcagtaaaaagccccgatcaacgatccgtagtttgttagccggcatggcttgccaatcagcagctagttctagatttagtagaacaatggccacgacgataattcctaatacggccggtagtgcgatttgtaggctcgccttacgaagcaacgtcagtaaaccaatcgcagcaaagaagacgataaaaaccacaacgcgccacggcttgacgggacgtacttgggccatttcatgttgatcgtaaaatgcgagcgaaaactgactcagcaaacggccagcaggcaacgcaatgataaatagtagcgccagtaggataaaggcaagccggtaaccccagttcagcgcaaaatctagcacaaagagaatgccgagaactaagaaaatcaaccagtaaattttctttaacttaaaatccgtctgcgcggacaagtgtaacttgatcgtcaagtaatagggccagatgttggcggatgtatatcctaagaatagggccccagccagcacggccacgatgttagccgtcaaactgaacaacaagctaccaaacgcacccagccagaggcaaatgagcaaataactactagccttgaggtttaggtgcttagtcccaaagacgctcgccgcccgggccacgtagaagaccacgatcgcagctaagtaattcgcgttgtgggtctgctgatacttaaagagaattagaacgtagggtaggacaataccgacgttagccaagaagttaagcgtcgcgacagagaagtccaacccagagtttcgtagacgagtcaaagataatcacaaccatttcgttagtttttctaggcctagtataccaattaattagagctaatgctgacaaaaggatatgtcggccgtaacatcgttagaatataaatagcctgatgagttgcaaataatataattatgtaacacgttactttaacttaatatctaaacaccacaaaacaatccaaaaaccgttatcaattgaataaccgtcaagaacagttcataatagtagtaacctttatgctaaaaattactataccaaactagatttaagtctaaaatacaccacatatcttcgagtagcaccatcgctgtgtcgttatgtatactgcaattcggcaaaaaattaataattctttattatttgcctcttgtcgacagggtagtacttgtattaaattagatatgttatggtagtgaacgtactatatttgtaggctttttcttaacgtagccatgttttattttaggaatagcgaattatgtatcatactattcttgtcttgctagtgtttgacttaataaggacaagttcataaaaaatccataattctcgtttataattgtttaataatatgtaccatgaatggagtaatgttgatatgatttatgctcagattttagctggcggtaagggtactcgcatggggaacgtcccgatgcctaaacagtttttgaccttagcaggcaagccaattttaattcataccgttgaaaagtttgtactggaaagtcgctttgatgcgattttagttgtttgccctgccgactggttgagtcacacacaggatctaatcaaaaaatacatctcagacgaacgagttcacgtggttaccggtggctctgaacgtaacgaaactttgatgaaaggtatcgactatatccaagaaaattatggtagccacgatgatgacatcgtcgtgactcacgatgccgtacggccttttatcacgcaacgtatcatcaatgataatattgaagcggctttagagcacccagcagttgatacggtggtgccagctattgatacgattgtgcaaggaacagaaggcaaaatcgacgatatcccagtgcgttcaactatgtatcaggggcaaacaccacaaagttttaatatcaaaacactagttgaatcttacaacgccttaactgatgcccaaaaggaaactttgtcagattcttgcaagatttgcttgttagcaggtcaagaagtgaccttagtgcggggcgaaaactataatttcaagattacaacgccttacgatttaagagttgcttctgctttagtagaaacgagggactaatatgttaaatcaagtttatcgcttagtagatcctcgtcagtttgaagtgcaaactgttgctgaagagatcaccaataatgatattattgtgcggccacgctttttatccgtttgtcatgcggatactcgttactttacgggtcaacgaccacaagcgaccttacggcagaaattaccaatggcgctcattcacgaaggcgttggtgaagtcgtcaaggatcctcaagataaatttaagccaggaacattagtggcaatggtaccaaatactccgtttgaaacagatcccatcattaaagagaactatttaccatcttctaagttccgttccagtggttatgatggcttcatgcaggagtatgtgagtctgcatcgggaccgtgcgattgtcgtaccagataactttgatcatcaaatgtctgcttttattgaaatggtctcagttggtgttcacgcgctcacacaattagaaggcgtcatggatgctgatcgtaaagtcattggcatttggggcgatggtaatttaggatttattaccgcaacccttgtcaagcaaatttttccagacagccaactcatgatttttgggcgccatcagtctaagctcgattatttctcatttgctgacaaaacctatttagttgatgatattccgaatgatttaaaggtcagccaagcactagaatgtactggtggccgggggagcgaatcagcaattgctcaaatcatccagcatatccgaccgatggggacggccattttgatgggcgtctcagaagatccagttggcattgacacgcgttccgtgcttgcagaaggcttaacactacgtggcgtaagccgaagtggccgcgctgattttcaacgagctgttgatattttgacggatagccccgttacacgggaacggttgcagaacttagtgggcttcactcgcaaggtcagcacaatccaggacatcactgatttctttgaaggggccttaaccaactattggggcaaggcggtgatggagtgggacgtttaaagacgttaaagctaacgctattacgcgctagctttaatcttttataccagcttttttactttctaggtggtcctaggaagcatcgggttacttttgcaacgatgcgaagtaaccagttaactgataatttgaaggcgctacacgcccagttcgaaaaagatggccagatggatattcgcgttttttgttatcattatgaccggacttttaaaagtaaactcggatttttagtggcgtcaatacgggctttacacattattgctcgttccgaaatgctgattattgatgattatttttttccactgtatgctattaataaacatgctaataatcaggtcgtccaattgtggcacgcaattgggtctttaaaacgttttggtttaagtttaccaacggcttcacaaagtgtgcttaaaccacatacgaattatgattgggtctttattaattctgaaattgataaacctgcttatgtggatgcctttgacgtcgatcctgatcacgtgattgccagtggcgaaccgatgatggacgaattaatgcgccagcaccctgaaacacactcgggtaataaacgcatgctatattcgcccacttaccgaccaggtatgcatggtgaggcacaggttctggcctatgtccgtgaatttgtgaatgccagtcaacaactacaggagccttgggatatttatatttcattacatccgtaccttaagttaccaaattggcatttaccatcgcatgtacatgtttttcaggatgcgactcgtgttaagcaaattatgccaacaatggacttgtttattacggattactcgtcattatcacttaatttcagttactttgaacgtccaattttactctatacacctgattatcaaaattatattaagacgtgtggtttttatgttgattactatcaatatttgggtgcaccacattttgatcgagctccagcaatcatgacgtttattaatcatgacctggaaaagctcgaccttgattatgtccatgatttgaaagcaaagacttttccgcatcaagatggaaataacgcacaacgagtatttcagtttttgatgaaacaactctaaatatttagtagggagcgcataatttatgttacaacgattaaaacggattgcgcggcgtgtcgtctatggacggcgggcaccagttagcgatacgcaagaattaacggaaccgaccgggccgcaaagtgatgcgcttgaatttatgaactcgcaacgaatcgccaagaatgccgaatcattgatcaaacgacaagtgactaaacttgattttaatagttcttacttagttattgaaggttcagcatggtttgaaaagtatcctgaaaaagatgccgagcggattattaagagtttgattctaattaacgatcaggccgaagaaattgaaattccgttggttaatacgactgttgaacggcccggatttccagcttctggttatcatggtgacgttaacttttcaacgatttctgatggaaagccactaatacctggtacttatgaaattaaattacaactgcaacagtatttaggcaatggttggctaattcggcggacttcaattggacaaatcgttgatacccatcaggatttgaactataccactaaaatgacgagttattcggccaagagtaataaatcatacagcttaattttccgctatagcttagcttcacaagcattgaaggtcacttcatacaaactgagtgatgttaacccgcttgaaaatgaatttaccgaagacgtcggcttagatagtgcggcgatgcgtgccattaaacgccgggcgctaaaactctggtatcggtggtactgccttcaaccgattcataagaaacaaatttcatttgtttccgatagccgggtgacgatctccggtaatttcgagtttatttatcaggaattaaaacgtcgcaatactgattttaagatttcattctatttgaagccaagtattaaaaccaaaaaatcctggaaagaggttcgaacgttagctaaagcgttggctactagtcgttatgtgattttagatgacttttacccactagtttacccattgcatatccgggaaaatgcggatttgattcaggtatggcatgcggtcggtgcctttaaaacgtttggttacagccgactcgggatgcctggtggtcctaagattcaatcactgaaccatcgtaattacaccaaagccttggtttcttcgcataacattgcggataagtacgcggaagggtttgggattgctccagataagattcagccgctggggataccacggacggatatctttttcgatgaacctaagaaacaggcgattcgagagcgactagcgcatgacctgccattcatcaagggcaaaaaagtcattctctttgccccaacgttccgtggcaatggccagcaatcagcatactatccatttgaaatgttgaattttagagcaatctacgaagcattacacgaagattacgtctttttactgaagattcatccgtttgtgcaaaacaaaccaacgttaccatatgaatattcggacttctattacgatgtttctgattatcgtgagatcaacgatttattactcgttgctgaccaattaatcactgactactcatcagtttgtttcgaatacgcactactgaaccggccaatgattttctttgcgccggacttagcggattacatgcaatcccggagcttttacttcaactactttgattttattcctggtagtttagcggaaaacacgggtgagttgatcagccagttgcaacatccacaagttgaccaagctaaattggacggctttgtgaacttcttctttgatgatctagatggtaagtctacagctcgtttcgtggatgcacttgaaaatgacttcgaggatccgaacgcagctgagttagaaaataacgacggtctcgccattagtgaagatggtaagattatccctgattggggtaaaaaggctaaataatatgttaagataaagcagtcagtcacatcatcagcgcatttacagcgttgattgtgtgaccgactgtttttgctaggaatctataggaggaattgatcatgtcacaaattacgacacggcggctcaccactgctgacgtgaacaaactacaacaaatcagtattgaaacctttaaggacacgtttggtgcacaaaacacctctgaaaatatggccgcatacttacaagatgcatataacttgcccaagttaacccatgaattagcggaacccgaatcacaattttattttgttgaacgagccggtgaatcattaggatacttgaaattaaacaccggtgcggcacaatcagaagcaatgggtccagacactttagaatctgtttaaaatctttttaagagtaatatcaagaaagcgagaatgatcatttggcgacttgaattaaggtgccgctcacaatttttccagagccgacgacatttatctaaccaactgaaagaacgctcaataatccagcgttgtggtaacacttcaaatttatgtagctcattgcgtttagccacctgtacggtggcttttaaattggattgaacagtggcggcgaagttgtccccggtgtacccaccatcaacaagaactgatttaacttgttgtaaatgttcacagtttagcgctagcatggcactagccccatcacggtcagaaacattggcagtagtgatatggattgcttgtggcaaaccgttaatatcaacagctaagtgacgttttattccagatattcgtttaccaccgtcgtaaccatgatgcttggcggtatcagtatttttaacactttgggcgtcaattattataaaagatgttttagccgagcgtgactgtttttcccgtagggtaaagacaatttttttaagcattgatccaaaatagaaggttcatcaaggacttgttcttcagaccatactcgataataataataaaccgattgccaacgaggaaaatcaactggtaactgccgccactgacagccggtttttaaaacataggccaccgcgcaaaataagtcgtaaagatcatatttccgtggtctggttgactgtcgtgcaccttctaaaatgggacggactagttcaaattgtcggcgagaaatattactgggataattcattactgatcaccttttttgaactatcataccaaattagctagattttaaacaggttcttagaagttgaacgaatctatatccgaaaagctttccaacaccaagggctcggtaatcaatttatgcaacaagcgattcaaattgctaaagctaatcacaagcataaagtttggcttggcgtttgggaacataacgaaccggcaaaggacttctatgcgaaatggggctttgaacaattcagtgctcacgattttgtgatgggtgacgatcgccaaaccgatttactcatgattaagtcgctgactcaggactagatcggaagtcgctgcctaattgacgacaccacccaagcagcttgttcttgaaaattaaaaattgtccgaagttcgtggctgtgccattaaaaatcgaactaccccttgtttttgttaagaaaggggcttatactattaatcaatcgcacacgattgaaaggggcatctgcatgacactagaaattgacctagcaaatcaactttgttttagcatatacaatgccaatcggttatttaacaaattttatgtcgaaacattaacgccattcaagctgacttacgcacaatatctcgtactaatggcattgtgggaacgcgacgatcagtcactacacgaattgggtcaagttctgcgtttaagtagcaacactctgacaccacttttgcggcgtatggaagacgccgggtggttgcaacgggagcgcccagcaacggatcggcgtcaattggttattcatctcacaactcaaggcaagcaacaacaagcaccaatcgaagccgcgattgcaacttgtatcagtcgctaccatctgaccatcgatgaatatcagcaggctttggccttgaaccagaagatcattaccgcattatcacaagatttggcctagatgggcctttttattggctatttcaatcgtgcacgactgaattataaatttaggaggaatctttaatggcagattatgacacaatttttatcggtagcggtcacgcgacgtggcacgctgcagtgacccttgcacgtgcgcaacaaaaggtagcaatcattgaagaggatacaatcgccgggacatgcactaactttggttgtgatgctaagattttgttagacggccccttcgagctgaccgaacagctcaaacaataccaggggattggtgtcaacacaacgcccagtatcgattggtcacaattgatggcatataagcagcaagtcattcaacccttatcggtacaaatgacggccgtattcaagcaattagggattaagattattacaggacatggcgaactgactgatacgcacactgttaaagtggccggcagcacgtatacggcggataccatcgttgtcgggaccggacagcgcccagccaaattagctattccgggcgctgatctaatgcatgatagtcgtgattttcttgacctaccaaccatgcccaagcggttgaccttgattggtgccggaattatctcgttagaatttgccaacatggctgtgttactaggatctgaagtgcatattattgagtttgccgaccgggcactacctgcattttattcagagcacgttgaaaaaatgattgcacatttacaggcagccggggtacacttccactttggtgaagcccttagccaagtgactaaaagcgccacgggattattggcaaccactaagaacggcctgaccattgagagtgatgacatcatcacagctactggtcggattccaaacatcgaacacttagggttaacgaaagttggcattaagaccgatcggcacggcattatcgtcgacgaccatttgcagacaaatattcccaacatttacgctagcggtgatgtcatcagcaagactttgccgaagttaacaccgaccgcgacctttgagtctaactacattgccggccaattgcttggaagtacggccgcgattgattatccggtcattccatcggtcgtctttacgttaccaagaatcgcacaagtcggtatccctgtcgaagccgccaagtttgatactgaacactttcacgttcaagcactaccatacggtaaactgttagcctttcagtatcaaaacgaggtcgatgctgatctacaactggtctttgaccaagagaattaccttgttggcgcctccatctatggtaatggcgcaccagacttgattaacttactgaccatgattattactgatcacgtctcagccaacacgttaagtcagaagatttttgcctttccgagtgcttcagtgggtatcattgatatgttgacaccacttttacaccatgactagttttaaaccaactgaccaatttaaaagatactgtgtaggcgtcgcctatacagtatctttttgccgttcgagactaactcaccgatagttcatgcctagggcccctaataatttgacaagcaggataatggccccaccgagcgtccaaatgaagacgccccagcttaaccaactggcctgaacaaataaactgatcaaaatgaaccaattcatcccaaagagccaccaactgagtgtgcctttcagaatcattgaccatacaaagggtgtcgcataccgatttagcaggataatcacaagcaatagggccggaatgagcatactttcaaacattgccaaataatggtacggatcgctcgtataagcgattgcccccaataaaccatagtgatttggtatcgtcgttaaaagggctgcttgcccaatataaacgatgattggttggccaatcaacagtgcgagtaatccccaagttatctttttcatcagtctacgccgtccttattgtttaataacactatcttaccaatctacataggcgcctaactaccgaataattgtaaacttctcgtgaaaaagacgtaaagaatgagcatgattcgttcactatgttttcataacataaataataggcattttaaaaaagtatgcgtataataccttcttaataagtttctatgggggagttatgatgataatagttcgagttgcaattacgatttcagtcgttttttacttgtattttattattaatttattgttgatcaatcactatcgggagcccattcaaagctatgaaaaagggcccacaccctatgaattatttttggtcattccggtactcaatgaagaacacgtgatctcgcgcacgattacgcaacttactgaatcactcgaacaattaccgccaaccgttcacgcccagatcattgccgtcgatgacgattcgactgatcacagtctactgttgttaactcagtcatcgtcgcgcttcttacaaattctacaccgcacgggtaaccagcgtgctggtaaaggggccgtcctcaacactgctgtccagtatattcataagacgttagcactaaaatctgatccgcaacgaacaatcgtgggggtcctagatgcagacgcattcatgaatactgctgacttgacacgggtgctggcgcactttgaacaagaaccacagttgacgatgatccaaactagtgtgaacatttataatcagcccaactggctgaccaagatgcaaaattttgagtttatgggcgttaacaatgccactcaacagctacgcaaccgtcttggtcaggggatcgcgtcgggtaatggtcagtttgtccggctagatttagcgttgcaaaacccatgggggaatagcttacttgaggatctcgaatttactttgcggacttggctgttaggtggtacccgaacagcttttgatcatacattagttgtccagcaagaagctgttgaacaattacgaccgttttttcgccaacgggtacgctggtgtcagggtgccgttcaatgtatgcgttatctaccagcactttggcgttcgggacgtctgaaccattttcaaaaattggacacgaccttttggattttgatgcctatcagtggttgtatcgtgccactgaccagtctaatcacgttagtcgtgcttgtgagccgtagcctacaacattggcaagttgggtggcatcacttggctatcgggacattactagtgatcgctttttcggcttgtttggtattagcagcactgtatcaacgcaactgtgccgtcgtgaaacaacccgttggattcatgaatgccctcaaacaaagtttaagctttcaggcattcttattgatcattagcctgacgccatacgtcgccatttatcggcagttacgcggtcaaacagcgtgggctaaaacgcgccatggtgttacgacccgcgttgcaaaatatccagatactggcttaaaacgctcatattaagatgaaggtgcatgccgatgaagtggtgctataagatatttcaaattaccgttctcacgattgcagctgccttactcgggtggatgattgtcgccaactggcaagtcaacctgaaattacacctcgcaatcagtgcttggataggcgctggtttattcgtattgttcattagtgccacgattggccttggcagctggtggttgagccgccaccaaactagctggttagttgcagcactgatggggttaactatcttaaaatttccactagttgcagggttaaagatcgacccgacctcagatttctggaattaccatacactagccgcgtttagtgcccaaggattcacctggacccaactgttacaccatggtatcgttggcaattacgtcgtttttccgcacgctttaaatatcgcgaacggctacagtttagtcgcggcttttggcggggccaacttttttgtcagccaactaatcaatattgggtgtactttagtcgatatggtcttaatttactggctagtcgcacggtggctctcacgacaattaggcatcatggctgccctcattttttactggattccagcttattggctgtacggcacgctcttaaatggtggtgaaccgttctttttcaccagcgtcctgctcatgatgtatgcgctgacgcgggcattagtcccactcacgacgaccacaatcacggatcgacgactatacctagcgttagcgatcgtgatgactgtcgtggccaatatgctgaggccaatcatgggcgtctggctaattgcactgggtttgatgagtttgtgtgtcctgcttaaatctcaccacctttaccgcgttcaagtacgtcagctcctcatatacagtgcggtcgtgttaggactcatgttcacagcgactaatctcgacagctggttatatggctttaaggttgcgccagcccaagttgaaactttatacagcctggctacggggacagatgttaaaagtcacgggacctatagcccggcactacaagctaccgtcagccacgaattacgggtggcgcccacgttgacgcaagcctatccgcgaatcacacgaacgatggcgaggactttgcagactaatctcaaacaaatcaagccacagttggggtcatttgttaatgaaaaaatgcagggctttattcgtgaggattatggctatgattggagcttatataacttaagccatcatcccggtttgcttaaccgccactggttttatttagcccctatattgattacaagtgcgacggtttattggcaggcaatgctggtgattgcgttattcagtgttttaatggggctgggactgctatggcatcaacactatcttaaccactatttgctaatggcagcgcttttgttagacggtttcaccttaagcgctttaccattagaagtacagggccgctatcatattatcttgtacttaccaatccttatgttgatgacttgcgggatcgcgggggccaagctctggcggcgtcaaatcaagcagagttgagtaacagtggcaatttcaagatcaatacccaaatgaatcgctagcgttcgaagctcactgaatgaaaattaaactgatgatataaaaaagattattgctgacagtagtgactgttacttcagtaataatctttttataatgtttaaaaggggacagatcgtctaatttgtactatcaaattattgtggctacggtcatagttaatagctggcactgccagtatcgttagcaaataccacggatcaattgactttaatggcccgtaatccccatttactaatgccgattgggtgctcgtcaaggtgccaggacagcccggtgatgaccactaaatgattgattgctcttcgccaacatgtcatggcaacgggtttcaagctagggcgacagtcagtactatgggcgatggatgacgctgttagtggctggggggcggttcggcgtaaaattacgcgggctagcaaaatcattgctatgagccgtcatgtcaatccgccaggcttcagccaaaacgtgcgttgcaatggatattgtcgtcaaaaccattgaattgcccaattgatccgataaaactggtgctgaagcggttttagaatgcgttgaaatggaataggcttaagagtagggcgaccgggtgctatttttggccgggtaggggttgtcacaaaaggttgaaatgaactccaacggcccatttgcgtaatatcggtttgcatgatgacattgcgttcgtgacaacttgctgcaaattacacaattttattagccgtggtattgaaagaacccatcaccccggtaaattattcaccaaacttttgatctagcacatgtccaacaaacatatgaggccatggcgaattattgttcgtagtctgcaataattgttgacactaaattgaatggcacaatcagctttaataaatacgcttaattttaggactaatggtctgaaaattaacaagttgtcaagccacaattctgactaataatcgccaaaaaacagttgaaagctaggctagttgccgctaattacctgggcttcatgcaaccgcaggtactcaaggatgccactcacatttatggtgttcagcccgcggcctctaatataaattacggtagactgatgtggttgtcgacaagataaattagtattacagactggtctaaattacacatctttaacatttttgaacgtggctgatgattcagttaagcgcgtgattgaacactgtcctgatacggtttttggcgtttctggtccatggcaaatcatgtcttttgaaaaaataaggctgtcgttagcaaaccatcgattcaataaatatgagcaataacatcattaacacagtcaaaagctatttcatgatgcatggtggccaccttatgaaccataatcatatattcacggtaagtcacatcaataatatgattcagtgagttcagtagattttataaaaatgtgccataaattaatttgccacccaaaaattatcgctgtactagcagtaaacttgatgacaattcacgcgataaaagcggtttgttgtgattatgatggtttatgtgtggattatgggtaaatctagctagggggctttttttacattttctagtttacataatatatattatgcaaagtagaatcaaaaacaaaattgctcccccacgacctgatttaggtcccctgtggtaattttttgattttaagttagctttctggtgattcagttctcagattgtcattttgtcgcaatcattttgctggctctaactgttcagaatttttcaagacgtccgcttaacttaaattattttttatgattcacaaacatcaacactaaaattagtcgattgaatttcaaccgagcatttttcgttaatttggatcaacttatctgaatcactaaaagttcaaatgttttcagactcctaaatccaattatcactagtttgcatgcacgctcataatttgctgataactaacatcgattttacggtttatttaagggacaactcttcaactaataaacgaacacgcgcttagaacgcgtctctcagcatcggtcaaatcgcttgtttttgttgtaaatttatgttttagttaaagtaagaattctaacccagaaaggatatcctactatcaatgaccgctaaatttccgtatgctaaaagctttctcgcctcattagaaactgctggcaagcaagctagtacgattgagcaatatgaattaaccttggctgactttttcaactatgagcagcacttcaatgaaacctttgctaaggatcaattattagcagatttaactgagaatgatattcaagcttacttggccatgctccgtgagcaacgccaattcaaaacatcgacactgaacaaatgtctgtcgaatctaaacggctactttagctatttattttcacaccgaattattacaactttaccaacctttacaatcaaagggcaacccttgaccaatcgtcaacaaacaacgacctggccagagcaattggcggcatggttagcaatggatgatctgcatccatacacccgcttattcttgttactaacgaccaagggttatactgccacggagatgctaaccccagggttttatcagcagttgaatgcaattacctttacagcagtagaacaggcttttctggttaaactacgggcctatttgcagccattacagactcaaagtggtagttcggacctttttttaaagcagcgtcaacgcggaaccgacccacatatcaccctcgcggcattgcataaatacttggcgggtgatagtcaacgtttaggtgtgccattaaagccggttgcattgcgccaggacttcatgctgtggtttctcaatcaacaccggacgaccgaaccgactgagatcatgcaacaactacggttagatgaaaccagcctcgaatattaccaaaacttgctacgacaacgtgatttgcgaactttaaaagccactaaaaccgactaagtgacactgatgggctaactgctacagttagcttttttagttaaagtaactttacgttgttgcacgatctttacataactttacaaacacgtcacaagcattacgtggaatttgctagttaattaagaagccttaaaacgcctatacaacgcacctttttgcagttaaactagttttattgaatttaactaaagtattgaaaggatgatttgatgacattctatcgttggttagaaccgtttattgaacaaaatggtccgttcgcgccagccgcttgttatgcgcactcagattttgattttcctttgactagtaatgttcatgaattatctgattatattacttacttaaatattcgtgactcagtcaaaaaatcattttattcagcattggacgcgtaccaagcaagttaacaatcataattgaactcaaaaaccaacctactagcccagcgacgattgctgtggttgcaggttggtttattcgtgtttttagccttatttttatcgagatgagactcaaacgatacgaagatcgcaaatctgagccattttcaacgcttaatcaccatctagcttattgccaatgttgcttaataaacgcctcacgaccacccatttcttcgatttgataacggaatggattgcgtcgataaaagtcttggtgctcggcttctgcgggataaaatggcttcgcatcttcaatggttgtcacaatcggctcagcaaacttaccgctagctgcaagtgcatctcttgaagcagttgcagttcgacgttgagcttcactattaacaaaaattactggtcgataactgtcaccacggtcctgaaattggccagaagcatcggttggatcagtctgacgccagtaaatttcgaccaagtcagcataactgattacatctgggtcaaaagtgattttaaccgcttcagtatgcccagtcgtgtggctggcaacttgttcatacgtcggattagcgacggtaccaccagtgtaacctgaaatgactgacttgatcccgggctgttgatcaaacggtttgaccatgcaccagaaacagccaccagcaaatattgcagtctctgtcatctaaattcctcccgtttattaactcaattatttaaataaactctgatactgaccataaccagccttttcaaggtcggcaactggaatgaacttcagtgctgctgaattaatacaataacgaagcccgccgcgatctcgtggcccatctggaaagacgtgacctaaatgtgagtttgcttgtgtgctagtcacttctgttcgatgcatgccaaacgactcgtcacggtgttcgttaagattagtctgatcgattggtttagtgaaggatggccacccacaacccgcatcatatttgtcacgcgagctaaagagtgcttgaccactaactacatcaacgtaaataccttcctggtaaaagttatcatactcaccgctaaatggccgttcggtcgctgcctcttgagtaacggcgtattgttcaggcgttagacgctgtcgtaattcaccttgctgtttatccattactatcagtccttccataattgagttgtgtacaatctaattacagtatttatcataccccaatctagctagaatgcaaaaaagaagctccaacaagtggtagcttctttttaaattaatctgtaaattaagcgttgaaggcgtccgttaattgagggacaacttgcttcttacgtgaaacgacacctggtaagcttaaccggttgttagcaatcgtcttaccaaaggctttttcaacaggttccgttgggttaccaacgactaataattccgagttactatctaagatattagtagccaagattaagaataaatcatagccgtcactcgcattttcgtcttttgcagcagcttctaaagcagcttgacgcttgaaaacatcatccaagtcaactgtgttgatttgcgcaacgcgcacggtcttgccagccatttcaaatgacttcgcatcggcatcgattaattccttttcagtcttgctgtcaaggttagtgcccgctttaagcattgctaaaccatacgtttcataatcaatatcagcaattttagctaagtctttaacaactgccacgtcagtttccgttgtggttggggactttaagagtaatgtatctgaaatgattgcagataacattaatccagctaacttggctggaatttcaatgtcattttctttgaacaacttgtaaatgacagtgctgcagcaaccaagtggttcagcccggtagaataatggttgggccgtgtcaaaaccagcaattcgatgatgatcaaccacgtgactaacagttacgtcagcaatgtcactcacactttgttgaggttcgttatgatcaacaagcataacactgtcaacttcatcactggccttagtaatcacccgtagtgctggttcatcgaagtaatccaaaacaaattgagtttcttcgtttggttcgcctaatgcaactgcttcagtgtccgctcccatcttattttcgtagtatgagaacgccttagccgccacgattgcgtcggtatcaggattttgatgtccaaaaactaattccttactcattagcacaaaactcccttaaaacttatttttgattaatcttttgtaaccgtgaaatataatcttcggtccgtaagtaggcatcaaattcatcaaggaaattcttgattcgcggaatttggtccttatctttacggaagacaaaatttaagtcaaacttgatggctggttcaaatgacaacgtgtggagcttatcagttgccggattagccaccataaatgaatttggcaacgccgtgttagtattagttgctgccacaaagcgataaatctgttgtggcgtcgtaaaccgtgcgactgccgttggcaaatcagccaactggttcttataagattccttaaccacttgatccaagtaatagttttcaggatacgtcacccatggattgagcgtcgtatctttgaacttgatgcgcttcttcttcgctaacttctcgtcacccgaaatgaatagcaattcgtcttggataatcttcttagactggtatggcttccagttcttgatactttcatcaggtaggtacatgactgccaaatcaatccgattattttctaatcgttcccaaatctctttacgcgtcagcatgtgcaacgaaataataacatttggattggcctcgtaatacttaatggcaaaatcctcaaatacatggtcttcaattgaagctagcacgccaatattgattgttccttgagtagcactagttgtctgctggatttcatcagttgccttgttcaatacactataaatactgtgggttgcgttaagcattgtgtaaccggcgtcagagagacgtaactttttcccaacggaataaaataaaggggcaccaacggtacgctctagttttttgatctgttgggtcaatgctggttgcgtaattcctaaaatttgagctgcctgtgtgtaattcatagtttcagctagttgcaagaaatacgttaacgttttcgatgagaaaatactttcttgagttgtcttcatgaattttacctgatcctttcttcttatcgccatcttatgatatctataattttatacaagattcaaagtgaaagcaagcggttgttattggtaaataaagcttaactaattcataatcttttaccctgttataatattatcttaatcgaatgcccgttaacgtgcaagtattcgcattggaaactataccgttagtgggatcggatggatctgcatagaaacaggttccccttcagtatcagtatcaactacaaaagagccattagaataacgcgcactagtaggatgatcatcattcaagatcgaatggtgcttaccacgatcagtcagcacatcaagtgcaaccccatttgcgtcactagcaactaagacataatcagcgacccggtgtggattattttttaactcccgtaagacttgaacgccccgccgtgcacgacttgtcacgggtaaatctgccaccttcatcttcttgaatgaaccccgttgcgtaatcatggcaatcaaatcatcatctgcggcgattgttgcccgtacaatggcatcgtcgcgcagatccatagatttcacgccgaccgccttcgcaccaatcgttgggacctcgcttaaatcatagcgaaggccatacccatgttgcgttatcagaatcagggttcccgttggtgcagctggtaagtattcgactgttacaacggttgcatcgtctgacttcattttgatgaactggctggcccgagtcttataagttcgacccggcgtgtaatcagcaaaggccgtttgtttgatatagccgtcactagttgccactaagaattttccggtagctttaaggttctcaaaagaatagacccacgtgatgcgctcgttttcagccagcccaatcgtctgagaaatgtgctcaccggtatctttccatttggcgtcagcaatttcataaatcggccggtaaatgagatggcccatgttggtgaacatcattaaatgatctaacgtgctatttttagctagatagatcggataatcctcatctttaagcccgttatcatcgggctcagacgctgaataagagcgtaagctggttcgcttgatataaccatcatggctaatcataacaatgacgtcttcttgtggaatcacgacctcggtcttgacctttaattcttgaatttcattttgaatctcagtcaaacggctcgttggataggctttttgaacggcctttagttcacgccgtaaaactttatcgagttctttaggctctgccagaatcagctgataggttgcgatagccttggccagttcagctgattctttttctagctgcgtcacatcggtattggttaaccgataaagttgcattgtcacgatggcttcagcttgaatctcagagaaatcgaattgactgaccaagttctgtttggcgttcttcttatccttgctaccacgaatcgttttaattacttggtcgaggatggacatcgccttgattaatccttgaacgatgtgttggcgatccatagccttctgtaagttaaattgggtccgacgggttacaacgtcccgttgatgttccaagtaggccgttagaatcgttttcagcccaacgtgttcgggccgttgatgataaatggcgaccatattgaagttataagtaatttgtagatcggtatttttgagtaagtaagtcagaataccttctgcattgacgtcacgcttcagttcaatcaccactgataatccctgacggtcactttcatcacgaacttcggcgataccttcgatcttcttcagaatgcgaatttcatcaatttttttcaccaattgcgccttgttaacttcataagggatctctgaaacttcaatctgtgatttattccccttaagcggtacgatcttggttcgcgaacgcacgacgatacgcccacggccagtttcataggcttgcttgatacctgctaagccttgaatgatccccccagttggaaaatcggggcccttgacaaagtccatcaaatcttcaagcgttgccttagggtgattcatcaggaataaaatcgcatcaatgacttcactcaagttatgcggcggaatttccgttgcataaccggctgaaatccccgttgccccgttaactaataagttcggaaagcgggccggtaaaacagttggttcgtactccgtatcatcaaaatttaggaccatatcgacagtctttttatcaatgtcttgaagcatttcaccagcgattttactcaaacgtgcctcggtataccgcatggcggcagccggatcaccgtccatggaaccattattcccgtgcatttcaatcagcggttcccgtaacttccagtcctgactaagacgaaccattgcttcataaatcgaagaatcaccatggggatgaaaattacccatgacatttccgactgatttagcggacttacggaacgctttgtcaaaggtgttgccatcctgattcatggcgtataagattcgtcgttgtactggcttcaagccatcacggatgtctggcaaggcccgttcttgaataatatatttagaataacggccgaagcggtcgcccatgacgtcttcaagggttagttcttgaatttttggttgttcagttgccattttacgaccccctctattgttttagctgttgtgccaattcttcgtcggcttgctcatgtgcggatgagacggcctcgttatctagtaacgacccgtcttcgtccaaattaaagtggacgttactttcgatccattttcgacgaggttcaactttgtcacccattaacgttgtgacccgtttttctgctaaggcagcgtcatcgattcgaactcggactaaggtccgtttttcaggatccatggttgtttcccatagctgttccgcgttcatttcgccaagtcccttgtagcgctggagtgcatagcccttaccaaatgacttggtcttgagcgttaactcttcgtcagtccatgcatattccgtccgtaactgcttgttctgctttttttgtaatcgatacagcggtggcaacgcaatgtagattttaccagcgtcaatcattggccgcatgtacttataaaagaatgtcagtaagagaatttgaatatgggcaccatcggtatcggcatcggtcataataatgatcttgtcataattactggccttaatatcaaattcaggaccaacacccgcaccaattgtgtaaatcatggtattaatttcttcattcttgacaatatcagctaatttggccttttcggtattcaacaccttaccacgtaatggcaaaattgcttggaactttcgatcacgcccctgtttagctgaaccaccggccgaatccccttcgactaagaataattcattcttcttagcgtttttagactgcgctggcgttaattttccagaaagtaaccgttcctgcttatgacgccgcttaccgtttcggctttcatcacgggccttacgggcagcctcacgagcctgccgagctttggtggatttgcgaatcagcatttgagcaaattcaccattttccatcaagaagaattgaagttgttcactcacaatattatcaacaatcgttcgtgcttcgggtgttccgagcttttccttagtttgaccttcaaattgtaagagattttccggtactcgtaatgaaataacagcggataacccttcacggacatcggagccttccaaatttttatccttgtccttcaataggccaaccttgcgagcatattcattgaacgctttcgtccaggcactgcggaaccctacttcatgagtcccaccgtctggcgttcgcacgttattgacgaatgacaacaagttttccgaatagccatcgttgtactgcgcagcgacctcaacttcgacaccttccttagtgccgtcaaagaacataatatccccgagggtgtccttatcttcattgaggtaactgacaaacgccttgataccatcttcgtaatggaagaccagctcttgttgttgattttcccgttcgtcagtcagcgtgattttgacgcccttcagtaagaatgcagattcacgcaaccgttcagccaacgtttgaaaattataaaccgtcgttgtaaagatactagcgtccggcttaaaagtcattgtcgttccagttggcttattagtcttccctttcttttcaagggtaccgacgggatgacccccatctttgaaatgttcaacgtagcggtagccatcacggacaatggttaccgtcaattcggacgacaatgcgttaacgacgctcgcaccgaccccatgcagcccaccagaagtcttataaccaccctggccgaacttaccaccagcatgcaaaaccgtgaggataacttcaggtgttggaataccggaagcatgcattccaactggcatcccacgaccatgatcgacaacggtgatgctgttatcggcgtgaataatcacgttgatttctttaccatagccagctaaggcttcatcaacggcattatcgacaatttcataaactaagtgatggagtccgcggctgtctgtagaaccgatatacattccgggacgtttccgaacggcttctaatccttcaagtacttggattgaagaatcatcatattttgggcttttcttggccattctcacaactccttttatctttaaaaatctacctcaactaggtgcggctttcaggtaaccgtaataaaatagtcctaaaagtcccaacctgtcaaggtacaattatgttaatttctaattgtcacttgtggctcttcatctgttagcatacacgttaacaattaaaatagcaaacacacgttcgcgtttaaaactatcttttaaaaattaagccacttactagcttacctcatgttgattctaagcgccagttcaatgaataaacttattactggtcacgactagttcttaaaatgcgtgattaatttgacagttagcgctttaaaggccctaaccacccgcttttaggcacataataattatcaaaaaatcattttattttcataatttgacacgcaatcatcattttttaaactaattaatccccacaatcttaaaaagaatgctaaaatattgagtgattctattacaggaggaaccaactttgaaaataataattatgctgatcatcgcctacttaattggcgcgattccttcgggtgtcattattggcaagtttttctttcacactgatattcgtcaagcaggtagcggtaatatcggaactaccaacacgtaccgggtcctaggcccgaccgctgggacaattgtcatggtgatggatattctaaaaggcaccatcgcagcactacaaccgaccttgctatttcatatgaataaccggtataccttattgattggactagcagctattttaggacatactttctcagtttacatcggctttaaaggtggtaaggccgttgccacgagtgctgggatcttattggcctacaactgggagttcttcttaattgctagtgccatcatgttattattggtttacacgaccagtatggtcagtgttgctagtatgacggcttttccaatcgtcacgttgattgcaattttttactatcaggattggttgctatcactcgtggcctttgcattgaccctcttcatcttctatcggcaccgcagtaatattgcacgtatcaaaaacgggaccgaatcattggtacacttcggacttggttggcgacgtcagcaacgggctaaccgcaaataattatgttactttcaagaccatttcattactgagtggtctttttatttaggaacgggtaagctttggtgctgggtttgtatttttcgctactagttaaagtaagatgatacaattctttattttgctatcttttcagaccacaataaaaaccggtcaaacctgtcgaccggtttcactaaaccacagtattttagttagaaaaagctaatcgcatatttagcatcaaacgtctggttcgctgcaagccggttaatgcccatcttatggcttaattgaccgtcgctatcaacgttatccgcaatgccccaccatggctctaagcacacgaacggcgcttctgcggggtatggtgaccacatgccgacgtatggtgcatcttcaatcgtcatcgctaccccatgatcatccaaatcagtgtccaacattaacgtcgtctcgtgatgattcaaatccaaaatcagggcatcgtccttaaacaaatcccggctaagtgctaatggcttggtcaggtcgaagtcatccgcatttgtcgcatcgttcaacggcgcctgtaatggaatatgcgcgtagacctttcgtggtgccacggtaatcttataatcagctagtgtgcccgccggatcagcgagtggcacgttaaatgctgggtgcccaccaacagaaaataacagctcttgattagctggattatgcacattgtagttaacggtcaattcatgatccgtcaacgtataaatcaaacgtaatcgaaacgcgtacggatacatctcccgtgtcgcgcgactatcggtcaattcaaatgttgcttgtgtggccgtttggttgacgaccgtaaagtcattgtcgcgggcaaaaccgtgctgtcccatgtgataagcctgaccagcaacggtatactggtcatcctttaaacgaccaacgattggaaaaagcacgggtgcgtgccggccccaaaaagttttgtcggcctgccacatgtactcaataccgtcactcgacttgacactacttaattccgccccagcttcattaatcaaaacggtgaggtactcattctttaattcgactgtcatccgcgtaaacgcccccttgataaattttataagatgtaacgactaagatccttatcctgtgcaatgttaccgattcgctcgttgacatagctttcagtgattgtgacttcgcccatttccatgtcaggaccttcgtatagcaattcttccaagagcttttccaaaatggtgtgcaaacgacgggcaccgatattttgtgtctcatggttgaccttataggcaatcgtggcaatcgcttcgattgcttcaatcgtgaacgtcactttaatgttgtccgtaccgatcaaggcgatatactgcttaatcaacgcattcttaggttccgtcaaaatcttaacaaagtcatccttgcttaaatcgtctaattcgactcgaattggaaaacggccttgcaattcagcaatcagatcactaggtttactttccgcaaaggccccggaagcgataaacagaatgtgatcagtattgatgggaccatattttgttgaaatttgcgacccctcaacgattggcagaatatctcgttgaaccccttcacgtgaaacttcaccggaaccttgctgaccacccttagtaatcttatcaatttcatcgataaaaataatcccggtattttcagcacggacaatcgcatcatgataaatatcagcgttattgactaacttttcggattcttcccggactaaaatttctcgggcctctgagactggcattgtccgttggatccgcttcttgggcattaaggcacctaaactatcaccaagatcaatacccatttgaccaagcatgttattattacccgcggcggcttgctgggggtcatccatctcgatggtaacctctgagttttctaagcgccccgttttcaactgatcggcaactgataatcgttgattacgaacttcatcggtcacttcttcgttacttgaatcgtcaacgttgggggtctggccgttttgcatctggctaaacatgttcatcatgttttggaactcgttaccattgttcttagcctgcttcttttgggccggtactaataatttgacgagccgtttgtcagcagcctgcaccgcttgtgcccgcacaccagaataagcctgttgtttttccatctcgatagccacgtccactaagtcacgaaccatggattcaacatcgcgaccaacatagccgacttccgtaaacttagttgcttcaaccttcacaaacggggcgtgcacaatcttagccaaccgccgggcaatttcggtcttcccgaccccggttggtccgatcatcagcatatttttgggggtaatttcttcctgcatttcagcagaaagttccatccgccgataacgattacgtagcgcgatcgccaccgcttttttggcttggttttgaccaataacataattatcaagcgcggccacaatttgtttcggtgtcttattgatttcttccatgagcgtttcctcctacattacaacgtttctgagatcacattatgattggtaaagatatcaatgtcgccggcaatatggattgccgcttcagcgacttccttggcactcatatccttagcatgtagctgcattgcgcgagctgcggctaaggcaaagttaccaccagaaccaatggctaagacgtcgttatccggcgtgattacttcaccactcccagaaacaagtaacatgtcatctttgttcatgacgatcaacaaagcttccaatttctgtaacgcctggtcactacgccattcctgggcaagctcaacggctgcccgttgtaaattcccagaaaattcgttgagtttcttttcaaaacgatcttcaaggttaaacgcatccgcgacactcccggcaaaacctacgacgacctgatcattataaatccgccgaactttatgggctgtccctttcattacgactttttcacccatcgtgacctgaccatcaccggccatggcgttatggccgttttggcgaacggcgcaaatggtagttgcttcaaatttcgttgtcatgttcagtctcctttgtcgattcccgcgttgcccgtgggaaaaattgacgataatcttgttgtaaatgttcctttgtcacgtgcgcataaatttgcgtcgttgacaaacttgtatgacctaacagctcctgcacggtccgtaaatcggcaccattattcagcatctgcgttgcaaacgtgtgccggagcatgtggggatgaatatcagccgttaaactacttttcttaacgatttgattcaagacatattcgattccgccgccagtaatggggccgccgtgacgattaataaacaccgtttggtgcgtttgaccatacttggccatcacgggctgccggcagacggtttcgtaatgctgaagcgcggtagccgcgtaccgaccaaatgggacgtaacgttccttgtcgcccttcccacgaatcaacatcatttttaggtcgtaatcaacgtcggctaattgtagatcgacacactcactcagccgaatcccagtaccatacaggacttctaataacgccgcgttccgggcccccattacgctatcatccgcatagacggtttgaaataatacgtccagctccttttgatagaaaaaacggggtaagcgcgccgcgtgttttttgagttggacgtacacgaagggattcaatttagctaaatcattcttaaccaaaaagttatagaacgaccgcaagcttgaaactttccgagcaattgaattgcgggtcaagtgccggtcatataaatgacttaaatagacgttaacgtccaaccggtcaacttcagtatacgctttcgcgccgccatttgccgttaagaaatcattaaaagcttgaatgtcttcccgataagcagcagcggtctcttccgaatactgtcgttcaacccgaatgtactttaaaaagagggttaaataatccgtttccatgcaaaaacctccatacgttgctactttagcaaagtatggaggaaaacacaattatgcaccctgtcaacggagcgatattttagttgttaacggtcaacgtttcatctttaaaagccgtcaggtcagccaaggcccgttcagaaatcgccgtattacgttcacgcttatcccgaatgcgctgtttgagttttggcataataccaaagttggcgttcatgggctggaagttgctagcgctcgtatgcgtgatatagtgggccatcgcccccatcatcgtgtccgttggaaaaacgaccggttctaaaccaagtgctaagcgcgctgcgttggttccagcaacgatgccactcgctgcactttcaatatagccttcgacgcccgtcatttggcccgcaaaaaataaattgggccgttgctgtgtctgataagttggcgttaatagtttcggtgacttcataaaagtattacgatgcatgacgccataacggacaaattcaacgttctccagacccggaatcagtgaaaagacccgtttttgttcgccccacttaagatgagtttggaagccgacaatattatatagatcaccagcggcatcatcttggcgcaactgaacgaccgcaaagggttgtttgcccgtcttcggatcttcaaggcccactggtttaagtgggccaaatagcatcgtttggcgcccacgttgtgccatcacttcgatcggcatgcagccttcaaagacatctgaattttcaaaatcatgcgcttcggccatttcggcgtgaatcaacgcgtcatagaaaacgtcaaattcggcttccgtcattgggcagttcagataggccgcttcaccacggtcatagcgtgatttgagatacaccttgtccatgtcgatcgaatctttcgttagaatcggtgcggccgcatcaaaaaagtgtaagtcatcttcgtcgttaaacgcttgaatcgatttcgctaaggacgctgccgttaatggtccagtcgctacgaccgtaatgccatctgggagactagtaatttcttcattaataatttcaacattaggtaacgcggtgattgcagccgtgatttctgcagagaacgtatcccgatcaacggctagcgcaccaccagctgggacagcgtggtgttcagccgcttgcatcacgatcgaatccatctgccgcatttcggcctttagtaggcccgccgcgttggctaattggttcgcccgcagtgagttcgtgcacactaattcagcaaattgcgccgtgtgatgggcgggagtcattttgttgggccgcatttcatacagccggacattgacgcccatattagcaatatgccaagcggcctctgagccggctaaaccggcgccaattacgtttactgttggtattgatgccatccagaattcctcttttcttgttgtcataccattgatagtattgttgtcatcatacctgagaaactagcagaagacaactaatggcatcagcaaatcctgcaatgacatgtccaccgtcaagcttaaagcgaacattaatttaaacgggcgtttattttcccgataaaacacttgttaatcagtttaaattacgaattttatcaacgtattttcaaaaattgtacgcattatttgacaatacacaaaaaaagatcatccgtagatgacctttttttcatttatttttgaacgttttcggtataatcgccattcggacaaagcacttgcttgccacctttgaccttcttttcgaccaggtaatggccatccttcgggcaatcacggccaaccggtttatcccaagagacaaagtcacaatctgggaagcgggaacaaccataaaaaatccggttcttcttcgatttccgctcaatgacctggcccttcttacattgcggacaaacgacaccaatttctttaacgatcggcttcgtattacgacaatccgggaaacgggagcaggcaaagaatttgccgtaacggcccatcttcacaaccattggcgcgccacaaatatcacaattgaagcccgctaattcgtctttgatttggatcttctccatactttcctcagccgttgcgacttctttagaaaacggcttgtagaaactatcgacgactttaacccagttttccttaccttcttcagtcgcatccaactgttcttctaaactggcagtaaagccgacattaacgacatccgggaagtattcctgaataatatcgttaacgatctcgccgagttcagtcggcacaaaccggcgcgcttctaatttgacgtagtagcgccgctgaatcgtatccagggttggtgcgtacgttgacggccgccccacaccattttcttccaatgctttgatgaggttggcttcagagtaacgtgcgggtggctgggtgaagtgttgttgcggatcagtcttcgataacttgaccacatcaccttcacttaaatctggtaagacgttattcttttccgtcttatcgtagatcttcgtaaaaccagcaaacttcgtcttcgacccgttcgcccggaattggacgtcattttggtcgatcgtgaccgccattgtgtcaagtacttcaggcgtcatctgactagccacaaaccgtgaccagatcagctggtataaccggaattgatccttcgtcaagtagtctttgatgctagctggtgtccggaagacggatgaaggccggattgcttcatgggcatcctgagcaccttctggtaacttgcccttgacaggtttggtggccgcatattctgcgccgtattctttatgcaagaattgtgacgcttcgtgcttcgcaatcgacgaaatccgggtcgaatcggtccgcatataagtgattaagccgacgctaccttccttaccaccaacgttgatgccctcatataactgttgcgctgccatcatggtcttacgcgtccggaaattcaacttccggttggcatcctgttgcatggtagaggttgtaaatggcggcgccgggaaccgtttacgttcttttttgacgactttgacgacattaaaatcgccattccggtctaattggcccaagattttttgcaccgcatcgttgtcatccaacggttgcttcttaccatgggttccataaaaacttgccatgaatttggaacgacccttttgaaattcactatcgatcgtccaatactcttggggtttgaacgctttaatttcattttcacgttgaatgatcaaatctagcgcgatcgattgcacccgaccggccgataacccctttttgacctttttccacaataatggactaattgagtaacccactaaccggtccaaaattcgccgggcctgttgggcatccactaggtccatatcaattgaacgcggttccttaaaagcgtttttgaccgtatccttggtgatttcattgaagacgacccggtttttatccttagggtcaagtcctaataaataggataagtgccaagcaatggcttccccttcacggtccgggtcagatgcgaggtacacggctttggcttttttagcctctttccgcaatcctttgatcacatcacccttaccgcgaatcgagatatagtgcggttcgtagtcgttatccacgtcaacacccatcttgctcttcggtaaatcccgaatatggcccagactagcgacgactttataagaacgacctaaatatttttcaatcgtttttgctttagatggtgattccacgatcaccaattttttagcgggtgttttgcttttccgcttggtagcagttttagttgcggtcttccgctttgccgccggtttggctttagttgtacttgcagccactcgatcagctccttacaggtttcattatcattattataaatatcagtttaagaaatccctgtaatcatatttcaaaaatttcgtgttgtcaaatttttggtaaaaactcttctattatatgtcgcgaatttaagactggtttggcccccgcaacgatcaattgattgcacccaactgaaaatggtgcatcaattggtccaggtaccgccagaacgttgcgattgttttgtaacgcgatattagcagtgatcagactcccagaatgggcctgcgcctcgaccacgataaccgtttggcacagcccggcaataatccggttacgagcaacgaagtggtatggttccggacccacccccagcgggtactcactgattagtaaaccgacctgactaatttgctgctgtaggtcacggtgttgacgggggtaactaatatccagcccggtcccaatcaccccgattgtcggtaagttaaaacgaagggcggtccgatgtgcaaaaccatcggctcccttcgctagtccactgacaatggtcaactttgccgttgctaacggtgccaataattgcgtcgtgacccgttccgcatacgatgtggcctgccgagcaccaacaaccgcaagttgacgtgtcgttagtaacgcacgctgcccgcgcaaaaacaacactaatggtggttgataggcttctaataaggccggtgggtaatcatcatccaagattgttaaaatatcaagctgcgcatggcgttttagtcgctgttgaaacgccatactttgccaatcagcggtaaaacgcccctgctgactagcagttaaatgggccaacttacctaatcggcggggatcagtgacgaccgtctgaacctgccgacagtgttgtaacacgcgtaccatcccggcatacccgatgccgtgcgctaaatgtaatcgaatcaataaacttcttaattgcatgttatcacgactccttaagttcgcccttgttgacattagtcgtcaacggaacggcttctttaaagagtagttacggatttagacccgcttagcatttcgaaccggtgaaaaagattggcgatgaatcggcgtagcgccgagactggccaacccggccaaatgcttagcagtcccgtagcccatattatcagcaaagtcgtacccgggatacacttgatcatacattgtcattaagtgatcccggacgactttggcgacaatactagccgccgagatgctcgcgcttttcgcatcgcccttgattagacgggtctgttcaattggtaccggcacctgcatcgcatcaactagtaaacgggttggccggacggacaggttacggacggcttgggccattgcgactcgggtcgcctcataaatgtttaattgatcaatttgttgggcatccgcaacgccgattcccacggcaaccgcttcttctaggatccgtggcatcagggccgcccgtttcttagcggttaattgctttgaatcattgacttctagcaaatcaaaatgatcgtccaagactacagcggcagttacgactggtccagctaacgggccgcgaccaacttcatcgatcccagcaacgtattgtccgccgtgggcccaaaaatcccgttctaaacgcatatgttgattaaaccgtgtcactaacgccgcctgtttttcagcttgtcgcaaatagtgttgataagcctgttgtacgcccttgcgaggatcggcttgagccgcggctagaagcgctgccgttggttggtcagccagtagccgtttaaaatccgcaatcgttcgttcaggcatcgggttgatcccccgttaagtcgagcgtaaaacgaccgagccggcccttgcgaatatctaagaggaaggccacgcagaaacgttcccagtcatcgcgcatccccgcatttttcgtcatcgcaatcagtaattccggatttggtaaggccaactgctcagccgtcaaatgataacgatcgactaagcgtgccgcgtagtgctgcttgaagaagtccaaggcaaacaaagcgacgtcatcgttaggatagatattttccttaatcgcacccgtgacggccagcttggtaccaacgacttggtcttcaaacttcggccataaaatccctggggtgtcgagtaattccaatttattggacgctttgagccactgttggcccttggtaacgcccggacgatcaccgactttggcaatttttttattgacaatatggtttaataaggtcgatttaccaacgttggggataccgacacaaactgcgcggattggccgattagtaatgccacgggccgcaatttttgctaacttgtcagctaacatgtcactagccgcttgcgtcatttgcttaccaatcgtacggctacgtgaatcgaccgcgatcgcaacttgaccctggtcttcgtaatacttgacccagtcagctgtcgcttggggatctgccaagtccttcttggtcataattaagaggtgtggtttttgttggaccgttttttcaatttctggattccgggaagccactgggatccgggcgtcgaccaattcaaaaacaatatcaactaaatgtaaattgtcctgaatttgatgaatcgccttggccatgtgacctgggtaccattgaatatttgccattacgttgtgctcctttttctcgtggcgtgaatgccttcaaactttgatcattgttaaaattcttgagcagcactggctgtcaagccgatgctgctagctccagtggcgacatgcttaagtgctttgcaccaaccgccactaatgcactcgttcaacgaaatcgttggtcgctatgccgcccatgaactaaaacaccggacacttgctagtccgggactggcatgatgcaacaatctatattttaccatgtttacatcgaccatgcttcgaaaccgcccattgatctgctgcccaatacatccgcacgttaatttagctaaccggaacatcgacaccattttattggctgcaggcttgcggtagctgtcaattagctcgttagtcaaagcacatcgcatatcacccttagcgtttcattaataatacccgccgatacaatcatacacacagttcacccactacaaatacaaacaagcgcgacgtcacagccctcatcatcaagatggccgcaacatcgcgcttgtttgattgtcgtttgatagccgtcagctaactaactgacgtgacttaatcccagaatttagctgcaatcttttgtccctgatcaatctttgcccactgctgagccgccgttaactcgttacctgagtcacacgaagcgaagccgcattgatgagataaatataactggttcttattcaaaatttgactagcttgcgtcagtaaccgtaacgcgcgatcttcatcatctaaggtattggtcttactggataacaggcccaagacgacttccacattcggccggtcctcaagtaccttgagcgctgaaagatcaccggcgcggtcatcgtcccattcaaggaagaaacggtcgtagtgttggtcatgcaggaatttcttagcaatcgtattgtaactaccttctgcaaagtgccgactttcatagttaccacgacaattatgcgtccaaactttcaaccctaattgatggccaaaatcaactaactcattattggtgttgacggccacatcagctaattcttggagactgccatttccagcaccaaagggactttgctgattatcactggcaaacacttcccacaagcagtcatcgaattggatgattttgccacccgcagcttgataatccgttaagaattctttatacgccccgagcaagcctgcatgcaagtcatcaacagttttgtaaatctggtcagggccatatagcttatcgatgtatccaaactcaacaaaggcgtgtgcgggactccagatcgttaatttaacgtcattaccatcggcttgtgacttaagttgctgataaatatcgataaaatgatgatgcttgccagacagtggtgctgtgatttcaatgccaatatctttacgtgtttcaaaatcactgccgtcatgatcgcgaaaattataaccttcatccgcaatgaaccgccgaacaccactaaacccccaaataaaatccaaatgccacattgacttcgtatattcgccatccgttagcacatcaatcccatgcgccttttcggtggcaatcaccgtcttcactgccgctgtttcggcagcctggtagcccggcaaagcctcataaaatgggtattgaatatcgtcacgatgttcgatttgatttttataagtaagtaaactagccgggcgtaagagtgagccgaccaattggaaatgtgtttttgtcataatgtaatcatcctccgtgtctgtcttaatgagtttattataacaatctgattataaaatagataagactgattgcattgatgatataataggcaatacctataacttaaataatttatttaatcacgccagctacaatcatgcgttaactagatactgaaacccaccatttctcaggaggtgcacttaatgcgtattcaacaattgcgctacttagaaaaaattgccacgactggctcgatcaacgaggcggccaaacagttatttatcagccaaccctcattatcccaagcaatgaaagaactcgaaaaggaatatcaagtacaactgttttatcgtcataaaacggggatcactttgacggatgcgggccgtgaattcattaactattctcgcagtgtcctcgaccaagttaatttactcaacgaacattttggtcagggaaccgttcgcaaacgtatctttagtgtctctgcgcaacactatgcgtttgtcgtgaacgcctttgtcgaattagtcaaggaaattggtggcgatacctatcagttcacattacgcgagactgaaacggccaacgtgctcaatgacgttcagactttgaaaagcgagctcggcgtcatttatcttaataagttcaatcagaccgtgcttagccgtttgattgctgacaaagacttaagcttcgtaccgctattcgaggctcgcccgcacgttttcgtcggtcgtgataacccattaacgcacaagcaagaactgactttggatgacctacgagactatccctacctctcttatgagcaaggcgatacgagttccttttattttgcagaagaaatcctcagtacgctgcctcataaaaagcatatccgcatcagtgaccgggcaacgatattcaacttgatggtgggtttaaatggctatacaatcagttcaggcatcatcagcagcgaactcaatgacgaaaaaattgtggcgattccactaaaagtggatgatgcaatgacccttggatacctgcgccataagaaaatcgaattgagcgctacggcccagcgctatttgacactattgaaacagcacattcaaggatatggctttgacgtttttaataataattgactgatcgacacatgacgtgactgaattcattttttgttaacaacatacagtggcgggttgttttttgcaatttgatcaaggctttaatgtccaaaccgcaatcgcctttactaaagcaggacacctaaaccatttaaacatcatatatatcctttttcaaaacccccgctgagtatggattaactcagcggggatatcagtttttttatcttaatttattgatgagatttcaacacactcaaaattcaatcaatcttgttcataataatatgcatttaaagtatatgttttaataggggtaatctgtaattcatatttttcaactaaatcagctaactcctgaccatcaattagtgttaccgtattatttccctgcatcgccttagctttagctcggttagtgaaatgactagttgtcacaaagataccatattcagcattaaaactatccatgacgcccttaaatttatcaatttcaggttcggatacctggtcctgcgtataccgtttgcactgtattgccacccggctagtacgaaactcgtcggatttaaaatagccaaagccatcgataccgtgatcagctgaacgtaccacaccacgatttttatcaatggtcacacccatttttgaaatcaatgctcgcgaaaagttttcaaactttccagaattgaatttttttaaacattcaattaaatcactcttccattgtgattcatctgcatcttgtcgcgactctggatcatcgattacgaccagatcctcatccctatctgccaacttgtcatcagattcctgcattgctgttaatttccgatgtactctttcacgtgtcttttgattccaatagttcgtaactagttgggtttgttcagaggtcggataatttgataattcagcagttctgccgatacttgtcagtgaaatttcctttccccattccatggaactaatatagccaactgtaagtagattttttaacccaaagttgaaatcgtataggaagggattatacgctcttccggtccgtgcactgactttagtatcatagacatcctcatacttcagattaacatattcatttgtagcaattgtctggcgtattatttttcgtgaggctgttccaccaagttcccgtagtgctaaaacgattgccttctctacattccaacgcttataactcatctcaaatgccaactttcaaatttaatgccaactattttttgacacagcaaactgtcaatattcggcttcaaaatttattctatcatgtttgaattagtcttgcgttgtgcgtttccccatctaaccaactaagatcacgaaaaaatacgacattcgggttgaatgccgcattttagtttggtttagctacttgtttgtttcaacatccaatgcatgtttggccgcaagcgcacgaccaaaatcagtttcatcaaaatgatcaatgatttgctgaagcgcggtcgcacttaaactggccccaaataacggactgccgggttcagtcataataccatccgccagtcggggatagctaatgggatcaaacccaagcgtctccacaaagtgggccacagttgctacggcttggggctcatcaccagctaccaatagggccttccgcgccggatcgccattaggtctggcgtcttcttgcagattatgataacccatatggttcagtgttttaaccagatggctccctttgaagtattgctggacttgttcgctggaggacgtctggggatccagaacttcttcccgtaccccgtctgtttcccaccaataattcatagcgtcaattacaagtttgccatcaagcgccgtagccgggatttgccggtaacgactcagcggtaatgctaaaataattaactcactgttggcgatgacatcctgattttccgacgcaattgcacccggaactagtgtttgaatcgttagttcaattttgcttactttgccagagcccgaaatgcgaacgtcatacccggccgccaatgccagttccgctaagacgataccaactttaccggcgccgaggattccaacgtttttgactgtcatttggtcgtcacctgcttcgcttgtaaaatagttttaacttgtggaatcacctgtgtcgcatacaattcaatcatccgttcacgttgagccgccgtttgattaccggccccgtataccaagtcaaagcgccccagccctagtgtttcaatcgtcgtcgcgatccgttgcgcaaccacggtcggcgttccaacataaaacgacccgtattttgtttcacggtcaaattgttcgtgactcattggcgcccatccccgggtcaatccaatgcgatcaaaattagctttgatattttgataagccaccgtcaaggcctcatcctgatcatccgcaatgaatccatgcgaatgcaccgcaatcggataagctgtctgattgaactttttagcggcttcgtgatacagtttgatatacggtttaaatcggtccgcccggccaccgatgattgcaatgatgactttatagccaatcttagccgcgcgaataattgattctggtgaaccaccaatcccaatgtaagtctcaagttcaccagtagctgtctttggatacacgtcttgattcgttaacgaagcccgaaacttacccgaccaagtcaccggcttttccgttcgcaattggtcatatagtgcgagtttttcgttaaataggtcatcataatccgtcaaatcatagccaaataacgggaacgattcggtaaacgacccccgtcctaacatcacttgggcgcgcccattagacaggccgtctaacgttgcaaaccgttcataaactcgaaccgggtcatcggaactcagcaccgttactgctgacgctaatttgatgtgctgggtcacggcagcggtggctgctaacaccgtttccggacttgagacactgtagtctggtcggtgatgttcaccaatgccaaaaacatccagcccatactgatccgctaactgaccttcgcgcacgatttggcgcaatgactctcccgccgactgtaaactaccatccgttttcgccacaatatccccaaatgtttctaacccaaactctagttgattaacatcaatcatcttaatgcccccattacttttattttacttacttttagtaagtggttgatgttaatatatcgtattatctctttaaatgcaactgataggcacagcttgacagtcaccttcaatcatgattaaaacaatctgccaattggatgaattccggttcggtagtaattcagcgatacaagcatcgcacagaataaaaagaggtattcaattagaatacctctccgtaactcatccgtaagttgttccgaaccaatcatcattgcaaaaatcaagtttgcacatgctatctagctctgggcctgccgttgcgtctcatgacgttgtgcccataagttgatcactaaagcgacaatcattaatccgaacgcaacaatcatgatattttgtagtccagtgtgtaagatgccacgcatcatcggcactaggtgcgctggtagccggcccgcccgactagcatcacttaactggttcatcatcgccatggtgattttaccatccgatcgtgccaccccactagtcagagcttggttcatgattagcccaaagatagccgtggtaaacgtctggctgagcatccgaatcaaataactaaacgaagtcgcaactggaatgtcacgttgatcagcgtctacttggaccttaacctgcagctcattaaagcaggccccattgccccaaccttcaaagaagccagctaagagtaagacccagtatggaagcttaacaccgccaatcatcaatggaacgaaggtcagcgtcaaaatgataatattgatcgtcaagacgcgatggggcgtcaagtgccgccgcatgcggggaactgattcactacccccaaaattagcaaaagcacttggaatctgcgtggctcccccaattaacgctgacgtccctagcaagccctgagcccacatcggactgtacgtcaaaaaggcaacgaacgcgccccaaataagcacaaataagacgaaatcgaccactaacggcgcgttcttaaacaggcggcccggaataaccgggtccacagcgcgacgttccacgatggttaaactgcccaacacaatgagcgcccccacgatcacgatcgcgacaatccataacgacaccatgccgatcagttcaataccaccaagcaaactgatgatcccaaccgccatcaataacgcccctgcacgatccattggttgcaagttatgttcccgcttaggttcttgatagaagatttgtaacagcacggctgagacaatcccaattggtacgttgaggtaaaagatccagtgccaagaccacacatcgacaatcacaccaccgaccatggggccaataatcgttgccatactaaagcaagccgagactagtcccagtgcccgcattcgatcacgcggattcttaaaaatgtccgcatacatgatgtaaggtaaggaaatcatccccccgttgccgagacccgcaacaccccgagcaataatcaaaaaccagatgttgggtgctaatccttgtagtaaggaaccgacaataaagagtgccgtcgtcatttgataagctcgcttattaccaaagcgctcacccatttttgaccagatcaaggtcgaaactgccgttcctagtaagaaaacagcgacgatccacgccattaaccgtagaccgtgtaaatccgcaataattgctggtagcgccgtattcacattcgtactatcgataccagccataacgttcgatagtaacagggcgccctgaacaaaataaatggcccgtcgattcacaacaaaacttctttctataattgctaaacatctcgtcagtcgttcagctaaaagttacctcaatccaacccgttgaaattcactatttcatactgatcaattaacgcacaatttctagtataccgctttacccccaccgcaaggcaagtctaaatcttgatttaaattcatgatgaacaagattttccactgccgatttataaagcacccgtgacaagccatttttgagcctaattcgtagatccacctccatcttgtcaaagcttcgttgacggtaccgcattaaaattccgtaactaaaaaggcgtaaccgaaagccatgcggatttcggttacgccttttaaaatatacgaatcagctttgaactaatttgtcttttcaatcaatttcattgctgcatcgtaagcccgatcattatcactgatcttattagctaattcagtctcgatcttagtcagtgtctgtttatcgaccttgccattgaccgttaacttggcatgcttttgatactgcttgaccgcactggtggttgaatcaccaaagtagccattaacggttccattaaagtaacctaaggcttgcaagtacttctggaacgtcttgacattgctattgaccttgtcagcttgtaaatcactgaccttgctaataaccgtcaagcttgcataactcggctcatcagctttaacatcaggtgtcaagcccttcttgttgatccaagtgccgtttggtgtcagccacttcgcgaccgtgatcttcatctcagtcttatcattaaaagtcgtcaccgtttgaacggtccccttaccatatgactgtgacccgaccagtttaacacctgccgattgatgcaaggctgcggagaagatttcagctgccgaagcactcccaccatcaattaagacggtcgttggcttcgtttctttaaagccaccatcatacttcttggacgccgtgtatttttcggtcgaaccatcgcgtgcttggacctgcatgatcgtcttaccattcttcaagaagattgaggccatcttcaaggcagccgtcatcaacccgccaggattaccacgcatatcgatgactaacttcttggcccccttcttatcgagtaccttcaacgccgtcttaaattccttagcagtattcgtcgagaaggtcgataccgtaatataaccgatcttcttatcgccaccgactaacttataatcaacggtcgtcactggaatcttagcccgcttcaaacttacggtaaaggtttgaccactgcgttcaatcgtcaatttgaccgtcgtaccgatcttaccacgcatcatgctaacggcttgtgtcaaggtcttaccggccactgacttgccattgaccgccttaataatgtccttcggtttcaaaccagctttcttagctggcgtaccagcaattggtgaaataatttgaacatagttgccagatttttgaacctgggcaccaattccagaaaacgaactgtcgatcgtgtcatttaagctttccgtctcgctcttgtccatgtactcggaaaatttatcacctaacgaattgaccatgccgttaatggcaccgttggccaacttattcgcattgaccggtttgtagtaattctcattgatcgtttcataaactgattcgatctttttcattgctttactagtctgctgcatactgctgagctgggcattgacttgccgaccaatcagccagtacgtcccaccaaccccaatgcctaatgcgacgacaatggaaataatataggtccatagaccaacgcgtcgcttgggccggggcactttttttatgtgcggattagtttgtttgggttcctctggcataccgaacgtcctctttcctacaaattaatttaagcttcacttgccaaataggcttgccacgcgtcatcaaagaccgtcatcgttggcaaataaccagcgttcaattccaaatattgtgagagttcgtgaaaatctttactctgctttggaaacgattgatccaaaaacgcattattggcaaattcggcaatggcatcggtactgtctgggttccgttgcgtcatcaagaatgtataaaatgttttatgcatgaattcactccttagtcactagtttttggaatatgcatttcgaacttgaactgattattcttcaaatcaagcttatctacactataacgaacatcatgtttaccaactaatttattcaagtagaggtcgattgtcttcttcttggcattcaacttgacccacttaggtgtcttgtaattattattaatataattaatcacaaagctgattggcaaggacatcgtcccaaccgataaattggttgctttcaacgaaatattgccgttatcgatgacacttggttgcatcgtgatcacaaacgacacgttctgacccagtacctgcgtcgttccgagcaaataagcgccggtagaccggaccacgaagcgatatttcatgtcttggcccttttgtagatcattcaaataataactcgcaagggcgtttaattgttttcgattcattgtaatcggcacactagccgcatccgtattgcttgcagccgtcaaactagtgctttcgctaggcgatcgtaagacctgggtgccgacgtaagcaccggtgccgacaatcaacgcaatcaagacaacggcgacccatttccaaacattgattggaccatttgtcttcggatttttaggtgctgatgcctgcttgtttcgttgtgcttcccgcatctcattacctccctattttttgattaaccacgcatcatgggccatcatggtctgatacagtttggttgtaaacacacgatacccccgcttattgggatggaaattatcagcagtcgaaatcaaatcattcgtcttgttttccgcctctaaagcgccagtaatggcctttgagctggttaagctagttaaggtcgtggcactcgctgctttcttcaacttgcgaatctgggctgccgtcttgtactggccgtgtgacatggtccaattgatatccataaaatacgtgtgcttgtattgactaaccgtcgtctgtgtctgatcattccactggctaatgtagtgcgtgatcgacgtcacatttggaaagttcacataaattggattatagatgctaaagacaaaaactgacgcagtgccattcaaactttgtaatttattaaataatttagttagtttattcgcatataaagtttgcgctttagcaaccgtcgcgttatttttggccgtattgttagaagttagggacccttcgagcgtttgcaagaggtcgttaccgccaaccgtcacagtaatcacatccgccttggcaattttctgttgtaacactttcgacttattaatgcgtgctaaaatctggtcactccgatcaccggacttaccagcattcgtggtcgtcaccttcagcttttgcttagtcgtcaacgtttttttgatctgaccaacgtagccaccctcggactcatcgccgaccccttcggttaaggagtcaccgaccgcgaccaagttgattttcgccttgtggggcgtcttcttggcagtggtctttttagtcgttgttggggtagtcgtcaccgattcattttgcggatgcagcagataattgaccccgaaaaacaccccgaccgctaacaccgccaccactaaaatgattttgatggtttctttaactttggacattggcatccaacctttcttcaccgttgagcagtccatttaatcagagctaactcatctttgaacaataaaatggtcaccatcccctgttgggacgatcaccatttgccattagtgctcgtagacaagtcgcctgtgggacaccgctcactttacgctggcgcttgcgtatgatattccacggcaaacgcacccgggccaccatgggtcgcaataattggcaccgttggttgaacactgatcttgagacttggtaaagccgcttgtaggcgcgcccgatattcttccacgcgctccgtggcgccaacgtgagagattgcaacttcggcgacgttcggcgttgcaataatatcgtcgagaaccttatcaaaaaacttattaatcgccttaacaccgcgccccttcatcttcacatctagggtgccgtcatcaacttccaaggcaatcttaacattcagtagcgtactgattgcccccgtcagacgactgattcgaccaccagcaacgaggttattcagggtcattacgcccatgaatagcttggtatgggcctgagtcgcatgaatctgatcgatgaccgcctgtttgtcagcaccactctgggctaacttagcagcagtcaaaacttgaaaggccatcgcacggtcggtcgtccgagcgtcgatcacggtgacatcggtcttcgtaatcgaagccgcttgttccgccgtgtgcactgttcctgaaatggcttcgagcatattgatacaaatcacactcgcgccatccgcacctaacttatcaaacgtttcaatgaacgttccgagtgccggttggctcgtctttggtaaagatttagccgttgccatcttgtcaataaattcttcacgcgtaatcgtttcatcttccacgtaaatggtgccatcgatcatgacagtcaacggaatcacggtaatatcgtatttttttacctcggcatccgtcaaatttgccgaagaatcggtcacaatcttgattttcgtcatactttgccacgctttcttatacttgtaacgtttaaacgatcgttacaataaaattaatgctttcagtatagcagaaatctgcctgagtttcacggttgccactgaattaacgacggcggaaatcatcaaattcgtacggatattgatttttctcatccaccgtcccaatttgttggctcaccagctgccactgcgtgtaatccacggccggcatccaagtatcaccatcaaaccttgcgttgatacgcgtccgatataaataatcggccaccgataacacggcttcaaacaccaccgcaccaccaatgacaaaaatcggttcatccggatgggcggccgcgagtgtttggatcgccgccacatctgctagttgatggacttccggtggcaactttaaatcagactgacgtgagagcacccaattggtccgccgtgggagcgggcgtttaaagcccgcaaaagtcttgcgccccatcacgacatggtgtccggtcgtcagcgctttgaaccgctgcatatctgctggtaaatgccagggaagctggccctggttgccaatcaggccattttgatcttctgcccatatcaatgcaatcattgcggcctcctaaatcgcgaccggcgctttgattgccggtgcgggatcatagccactgagcttaatgtcactcatttggtaatcaaaaatactgtcatgagccccacttaaagtcagctggggtgccggccgaggttgccgggtcaactgcgttttaacttgttccacatggttagtataaatgtgcgcgtcacccaacgtatgcacgaactcgcccactgctaggcccgtctccttagcaatcagatgtgttagtaacgcataactcgcaatattgaatggcacacctaggaagacatcgcctgaacgttggtagagttggcaagagagcttaccatccgcgacatagaattgaaacagagtatgacacggtggtaacgccatgttcggcacatcttctggattccaagcggaaacgattaaccgccgcgaatccggatgcgtcttgatcatttcaatcacattggcaatttgatcgatcgtctttccctgacgcgtttgccagtgacgccattgcgcaccgtaaacgtcacccaaattaccatacttggccgcaaacgcgtcgtctgtcaagatctggtcatcaaaggtctgcatctgagcttgataaatcggcgcaaagtcaggatcatctagccggcggtgttcaaaattcgtcatatcagggccgtcataatcggcactcgtaacccaatttttgaacgcccattcgtcccagatatggttgtgatgttgcaataaatactgaatattcgtatcaccatgcaaaaaccatagtaattcgctcttgatcaggccaaagggaacttttttggtcgtcaataacgggaagccttgactcaggtcaaagcgcatctggtaaccaaacacactgtatgttcccgtgccggtacggtcatccttatacgtgccgtgttctaaaatggtgcgcgcgagttgtaaataactatcttctaacatgcgatcatcctttcaggcttctgcatactggctgaggtagtcccagcgatccatcttctcatcaatcgtttgttccgtcttagtcaattctttttgcaaatcagccaacttgccataatcactggcattggcagccatcgccgcttcgatctcactcttatggctatccaattgctcgataaccccttcgatcttgtcgtattcgagctgttccgcgtaagtcagcttgactttggctttcttggccaatggtgcggtcgagtcatccgtgaccggcttagccgtagtttttgtcgcagtggccttggctgcgggcttggccgcgtctttttgatccttcaaataactggagaaacggccagaatagcgttcaatatgcccctgaccatcaaaaatcagtagtttcgtgccgaccttgtccaaaaaatagcggtcatgggaaacagtgatgacggtcccggcaaaatcatcgaggtagttctccaacaccgttaacgtaccaatatccaaatcattagtcggttcgtccaataagaggacgttcggctgttgcatcaacaacttcagtaagtatagccggcgctgttcgcccccagataacttgcgaatcagcgtgccgtgcatcgaacgtgggaacagaaactcttctagtaactcagtcactgaaacatgctcgccctgcttattcaagaccgtctcaccgacatcttgcaagtaattaatgatgcgcttgtcgcccggaatcggttcggtctgttgagtataataggccatcttgacggtctcaccgatcgtcacggtcccactatcaagtggcagtcgacccgcaatcacattcaataaactagatttcccggcaccgttgattccagtgataccgatgcggtcattggcttggatcaacatcgaaaagtgatccaggatggtttgccgatcaaactgcaagctcgcgtcctttaactcgatcactttcttacccaaacgctgctgaccgagcgaaatatcaacatcgttatcaacttggagcgtattcaaattatccttcaaatcattgaaccgattgatgcgcccctgttgcttcgtgctacgcgcgggtgctcccgcacgcatccaagccagttcctttttgtacagctgctgttgcttatgttcagctaacacgtcacgggcgacccgttcggctttcgcttgcacgaaatcttggtaatttcccgtatacttatgcagctcgccaaatgacaattcaaacatctggttggcgacttgatccaagaaataccggtcatgggtcacgacaatcaaagcacccttataactagctaaatagctttctaaccactcaattgagtcaaaatcaagatggttggtcggttcgtctagtaataaaagatccggtgattgaatcaacacttgcgccaggcccacccgcttctgttggccccccgacatctgactgacggtctgcgtcaggtcggtaatgtgcagttgtgtcaaaatcgttttgacatcactttcagccgtccaagcatcttcttggttcattcgatcctcagcggccacgtaagctttttgggtcgcttggtcttcgggatgatcagcataagcggccaacgtttgctcgtagtggcgaatcgttcgaaagacttgctgactaccggccaaaacggcatcaatgactgtcagattctggtcaagttccggcttttgctttaaataaccaatcgtataatttttgggcatcaccagttgaccggcttccggtgccgtaatcccggctaatacgtctaataaattcgttttcccggacccgttaacgccaatgacaccaatccggtcatgttcattcacaataaatgaaatatcgtgaaataacgtcttctcaccataagttcgggtcagattttctgctcttaaagtttgcattgttacgatccaccctttttttacatcattaagttctatcttagctagaatcggcttaaaacacaactgacaaacgcgcaaatcaacgttaatatttcctaacgatcatcgattcgattgggtcgtgagtcacaaaaaaactcctgaggctcactcggccccaagagttgtttggcaacaccttattagttatgatcaccataaacatcaaagacggtccgtccatcatcaacgactaagtgtaattttccatcgctggctaatgagctcgtctgataaatgttgtcgataccatccgcatcccgtggcttgaatggcaagtaaatttgttcactaccacgttcgtcgccaaacaggatatcaattttttcaatgtcttgataatgtgtcacccgttcaaacatcccacttgtcacggatgatagttgggtcgtgtccggatcgatcgcatcagcgtcaggtttaaattcagccttaaatgatttacaaggatgaatgatggtcatatggccacccttaattcgaccgtaactcgtcgttacccggccgatccacaggtcagagatatcttgatgatgaactgtccaagtgtcaccattccgaaaatgaaatttcaatgcttctaatgctcgttccattcaaatcacctcattgaattagtttcactttaatcgtaacagattcatagaaaatatcaatggttttttgaatccgctaccatccttgcaaaatcaagcaaagcatcctgctgatttgggacctgtttcatcaccacggcctgtaagcaagccgctagaatttgacccatcattggcccaggcgtcaccaatttagctttcaataaatcgccaccgttaatggccaattcatgcttgtcatggattggtaagctagcataagattgcaccaattgtgcttggtcctggccaaagcctaaaatcgtagccacctgattagccgttttcagcgcctctaagcccgtataaaagttctcctgcgcagttaactgaccgttgtgttttaacgccatcagcgctttaatagcggccgtcacgtgattaatcagctcattgctcgtcttccacgtctttaacaactggcgaacagccgcttcgtcagtccgttgcatggtccagctaagcaaggtccaagtactttcaatactcggcaaatgccaagctggaagtgccattaactgccgcaacatcgcttcttgatcagccattgcgggcatataacgatacaagtcagtggtcagcaagccggtcaaaccagcaactgggtgctgccccatcagcagcttctcccactcgacacgcgtccgttccacggcaattttcgccaacaacgccgcattatcggcaatcgcttgttcggtctgcgattcaatggtaaagcctaactgacttgcaaaccgaacggcacgcatcatccgcagcgcatcttcgtgaaaccgttcttcagccactccaacggcgcgtaagattccttgttccatatctgctaacccgtcaaacagatcaatcacttcaccgttagcagtcatgactaaggcgttgattgtgaaatcccggcgcttcaggtcctctttcaatgatcggacgaacgtaacctgatcagggcggcgaaaatcttggtaaccagattcagtccgaaacgtcgtcgtttcataaccattgccgtgatctaaaatcatcaccgttccgtgctcgattcccgtatcaaccgtccgtttaaataattgtttgacctcagccggaaacgcgctggtcgcaatatcgacgtcatgtaggggcttccccaaaatcgtatcgcgaacacacccaccaacaaagtacgcctcatagccggccgcttcgatcgtctcaataatcggcttagctgcttgaaactcagctggcaactgcgtcaaaatcatagtaagtgctccaaaccaacaaagagttcgtgatactggttaactttttcaaccgccactttgacaccagtcataaatgagatccggtcaaaggaatcttggcgaatcgttaacccttcaccagggccgccaaacatgacctcttcgtgcgccactagtccaggtaaccgaaccgcgtgaatccgcatcccttcatattcggcaccacgtgcgccaggtagagtttcagttgcgtcaggattaccttgttcctttggttgccgaacttcagcaatcttcttagcagtactgatagcagtaccacttggcgagtcaatcttatcgtcatgatgcatctcgataatttcaacatctgggaagtacttcgctgcttgttgggcaaattgcatgagtaagacggcactgatcccaaagttaggcgcaatgaggccgcccacttgcttgtcctttgctaatttttgcaactcggcaacttgttcatcggtcatcccagtagtcccaataacaggcgaaataccatagttaagtgcaaactttgcattttcataaacggcggttggaatcgtaaagtcgatccagaccgtggcatccgtcttaatttggtctaaatcatgaaaagctggcacgtcttgacccttaaagcggtcgtcctcacctagattttgttctccactgcgcgcgtcatagaccccaaccaattcaaaatcaggattatcaatgaccatctgagcagccgtactacccatccgacccttatagccggcaacaattacttttaccacaataaattcctcctcaagattaagctaattatattttagcagacaattgccaaattaggcaggagaatcctcgccgaacctgtttaaactgttaaactacccccattttgttcgtacccaatgactaaaacggtcccgctaattaacttgctactttgtgagacgagccacgtccgtcctataacactgatatgaataaaaaatagtgtctgactcaaagcgtagtcccgctcggtcgaacactatttgcttatacatttcggccgccaacaacacctggtgacgctaaattaacgtgtcaatcgtcgctaacaccccatcatgattattgtcatgtgacgtaaggtacgtagccatctctttgacgggtgcaatcgcattttgcatcgcaaaactgtaatcagcctcccgtagcatttcaagatcattaccgttatcaccgaacgcggccgtttgactaggggcaacgtgccaatgctgctggagataagcaagcccggttgccttgttaacatgtggtggaatgacgtcaagcccattaccaccgctgacagtcgcacgtaaccggccagcaaattgctgattgatcaaagcggcgtgcgcatcagcatccgtggcttgccaactaaaagtcgctttatagatatggtcatcaattgctgatagcgatggcaccacttgcagccggctcaaatagtaccgcatgatcggactgtcatcttggggccgaatatatgccccttgcttgccggagaccgagatctcagcaccagccagtgctggttcagtcgccacgtaaattaacagttcctgataaagcgccggctcaatcaagctttcagccaacacgttgccgtgattatcaatgactaacccgccattttcagccacataggtcaattcaccgttgatcccgtcaaaaacatcaatacaatgttgtagctgattgccgctcgccacaacaaagtgctggccctgagcattcatttgatccaactgggcctgaaaccgatggtgatcaaactgatggtcgtctctcaaaaacgtgccatctaaatcggtggcaattatagctactttcacgatagtaaacgcctcacttgaatttgatatacgttcattttaccaaaattgaaagtggtttcaataactttaggaatgaaactctcagcaagcggtgaagaactaaaggcctagtagccctgatcctcgtagtcttctagcatcgcaaccatttcaccatcatctggttcaatcgttagataattccgcaacgctgccacggcactgtcggccattcctgcttcgcggaagaaataaattgctggtttaaggaaatctttgttatgttcaaagaacggataagccgcttcgtaattatccttagccgcctgaaaatgatcgagccggtcattagagattgccaagttccagtagaactgtggatcaaactcattactttgcaaatattgatccaacaagtcgatattgtcttgataacgttcccgctgaactaacaaattagacagttccaataccgtagtcaaattatcagggtcaatactcaagccttcccgtaaatacttttcagctaattcctgatcgtctaatttcaaggctaagcgggcagtttgcaagtacagctgctcattgtactggtcgaccgctaaaccttcttgcaaggttaataacgccttgtccagttgatgaagttgttcttgggcctgggccaagtatggatacagggacgcatactgattgtcttgttcccgcagtttgtcgaagatatcaacagccttctggggttcgtttaattgcaaataagtgaagcctaattcaaactggctgtccggcgtgagcttggcaggcttgatttgttctaaatagcccaccgcctgttcaaagcgcccggactcagcataagccacccctagtcgttcaactaagttaactttagagatctctagttgtccctgcttgatcaagtccaagtagaagcgagtcgcctgaccgtagttacgaatcaagaagtaaaattctgcgagcgcaaattcgacaactggttcgtccggtgccagctgataggcttccttgagtttttgctcactgacttcaaataactcttgggtctggtatagatcggcctcaactaacaacgcttgaacgtatgccggtgagtctggcttaacttgttgtaaatagtcgagtgccaggtccgtatcgtcctcatcgatggcaatatcagccagacttgtccgtaagtcgtcctcatcgggatacttagccagtaacttcttataagtccgttccgcttgctttaaaaaacccaaaccgtacaattcttcagccagactatacagcgtctggtcatcgtccttacgtaaggcccatgcaaagtgctttttggccgtgtcaatttgcccgtttgatagtgctgcgagcattttttctgaataactcattacacccatcctttaaaccactaagaaacgacttcatttagtcgccatggtttcatcatttatttcaatagtcagcctgatatcgtcacatgggataccagctgttaatcgcttgacctgacagtctatcataccgcagacgacagcaaaaaagccagtataacggtcgctatactggctttcatgtttgcatttcattaactgatatgcattatttaactgcgtcctttaaagctttccctggcttaaatgcaggtactttgcttgcaggaatttggatttcgtcaccagtttgtgggttacggcccttacgagctgcacgttcacgtacttcaaagttaccaaatccgatcagttgaactttttcaccctttgcaagagtgtcttggattgatgcaaagactgcgtcaactgcagcagttgcgtctttcttcgttaagttagttgccgcagcaacgttgttaactaattcagctttgtttgccatgtttgattcacctccccgttacagagtgaaggatcgccgtgctttttaacatcgttgatccagatgatcatttttgagtggtccaaaaatgagagaaacgataacaagcatcatttcttcatcaaagatagcataggaatgctgtaatagcaagcttttttagccttttcagcgaaaatagcgcaaaaagatgataatcgtttacatcaatcaaataatgtgctaaaatgctgattttacgcgctttagcctacttacgtcgccgttcgatcatgtggatcggcgtaccactaaaatcaaaggcattccgaatttgattttcaaggaaccgttcatatgaaaagtgcatcatatcagggtcattcacaaagaccacaaaagttgggggttgaatcgccacctgagtggcatagtaaacccgtagccgcttaccattgtcactcggtgtcggattcatcgcaatcgcatccataataacgtcatttaaaacggacgactgaatccgccgcatatggttcatattgactttcttaatcaacgcgggtagttgctccaaacgttgattagtcttagcagagacaaaaataatcggtgcatagctcaagtaaacgaactgatcacgaatatacgcttcgaattcttgcatggtgtggttgtctttcttaaccagatcccacttattgaccacgatgataatacccttacccgcttcatgtgcataaccagcaacccgcttatcctgctcacgaatgccttcttcaccattgatgacaaagagtgccacgtcactattatcgattgccttgagcgcacgcataacgctataacgttcggtattttcgtaaacttttccttttttacggataccggccgtatcgaccatcacaaaccggtcaccatcctgatcagtaaacttggtatcaatggcatcccgggttgtcccggccacgtcagaaacgatgacccggtcttcacccagcaaggcgttgacaattgatgacttacccacgttcgggcggccaatcaaactgaaacgaatcgtccccggttcgtcctccccacttttttcaggaaagtttttgataacagcatcgagcaagtccccaagtccgagtccatgcgcacctgagatagggtacggatcgccaaagccaagggaataaaagtcatagacttcactccgaagttcaggattatcgactttattaacacccagcacgaccggtttgttcgaccggtacaagatttgggcaacgtgttcatcagcgtccgtgacgccttctttgatgctaactaaataaataatgacatcagcttcatcgattgcaatttcggcttgctgtgtaatctgtttaatgaatggggcatcttcgatatcgatcccacccgtatcgatcaaactgaattcttgaccaagccattcactgttggcgtaaatccggtcacgagtcacacccggtgtatcttcaacaatcgagatccgatcacccgcaatccgattaaaaatcgtggatttaccaacgtttggtcgcccaacaatggcgacgactggttttgccatattaattcctcctttaccctcgtagcgtcaggttcctgctacaagtctcaaattaattggtaacaccaactaatctgttcctaaaaaaatatccttcaaggcaagcttgaagggtatttttaatcaatcaatgattagttttcatcattgttgctttcagcattcttcaattcgtcaccgatcaaatcacctaaagtgaaaccagttgattcttcaggagcattagccgttgaacgttcgctagcagtccggttgtcccggttgttgttacgacgacggttattgttactccgacgttctggttgactttcgttgtcatcgtcagcagtttgtggcttttcttccaaagctttaattgataaagctaaccgcttttcgtctggacgaacgtctaagactttgactttgatttcttgaccaacttttaagacatcgtttggtgttgcaatgtgttggtgtgagatttgtgaaatgtgaactaacccttcaacaccagggaagacttccacaaaggcaccaaaactcgtcaaacgcttaactttaccatcaagtacagccccttgtggtgctttttcttcaataccatcccaaggttctggtaaggttgctttgattgataatgaaacccgttcgcggtcagcatcaacggataaaatcttaaccgtgacttcttgaccaaccttcaatacatcagcaggcttttcaacccgttcgtatgagatttctgaaacgtgaaccaaaccatcaatcccgccgaggtcaacaaaggcaccgaagttcgttaaacgagcaactttaccttcaacgacatcaccagcttgtaaggtcttcaaagcttcttcacgttgtgcttcgcgttgcttttcaacaacggcacggtgtgataagatcaagcgattttcgctaggttcaatttcaataatcttaagttcaagttcttggcctttataggcatttaaatcttcaacataatgatcatcaatcattgaggcagggatgaagccacgaacaccagcgtcaacgactaacccgcccttaacaacttgcgttaccggagctttaatcgtatgacctgcttcgtattctttttcaacatcgtcccaaactttgcgagcttctaaccgacgatgtgacagtaaataactgccgttttccttgtcgctgccaattcgagaaatgacaaccaagtctaatacatcaccgactttagcggcttcgttgacatcgtcaacccgttgtgttgagagttccttcaaaggaacgaccccttcaacaccggtaccttggataccaacaattacttgtttgtcgtcgtcgattgctaagacttcacccttaacaacgtcaccgacgtttacttcttcaacgctgtttaaagcgtctaaaagttcatttttctcttggctgttttcgttttcactcatgcaaatttcctcctgtcaacaataactctaacctatatcatagctgaaaatgcaatgaaaagctagctaaaagcattaagttaatgcaattagattgttgaactttgtttttttgtaataattttggcaatggcagcaacaacttcatcgattgacattggcgtcgtatcaacaagtgtggcgtccgttgcttgtgttaatggtgacactttacgcgttgaatctttgtggtcacgtaattcaatctcagcctgtagctgatccaagggcgtgtcgatccctttttttacattttcggcgtatcgacgcttagcccgttcagccgctgaagcaactaaaaagatcttaacttcagcattgggcaataccgttgtcccaatatcacgaccgtccatcacgatcccacctgcattggccatctctcgctgttgctcagttaaaatcgtacgcacctgtggtaacgccgcaatcgtcgagacgttattcgtcacgtctggttggcgtatcgccgccgtaatatcttcctgattagcaaaaaccagttgatccggctcgccgggtttaaaactgatcttgagcgacttcattgccgtaatcacagccgcttcgtctgctaaatcaacgtgctgttgcattgcccagtacgtgactgcccgatacatggcaccagtatccacataaatatagccaaaccgttttgcaacgagtttggctacggtactcttgccagctgaagccggaccatcgatggccacctgtaatgcttgcttagccattaactaacccctcacaatctgaaaaaatcgtgtattaacggacacgtaaccgttgaccagccgaaatcgttgcatcagatgataacccatttaattccaatagcttatccactgagattccagcattcgtagcgacccgatagaccccttgaccggcttctaccgtgacgtacttagtccctgaagatgattctgaggagctactactactgctagcgctgctgtcgtcagtactcgcactttcttccgagctggcagcagtagaactagcagccttggaactggcagctttagagctagccaaggctaagctactacttttagcagccgcctttttcgacgatgcggccgccttcttcttgctagcagcagtcgatgacttactggcagcaacactggccgatgacttcttcgagctcgaactagcaacttgttcagtctgttgcggattattaagcgaattctttttcaccaagaaataaccaattggtgccaaagcaagcaacaatattagtacgactaacacggtcgttagcgtagagttgctactgtcttgttttcgtttttgagttcgcgataaattgcccgagtcatcccgatcgtcttcaaaagttttgtcccacggcttatccgcttgggatttgtcattatcatttttttgactcatagggtgttcctcctcaaaaaactttcaaccaatattgtaacataacccggaattgatttctttaagaatttggtaaaaacaattgagctaagtgctgatcccacgacattatcgtggctgttggctcatcatgcgtcgccatcagccctaacgcagccagcggtagtggttcaccagccaactgacaacactgatctgtatgggtaacagctggctcaccaaagtaagttaacatcacggtccgatgacaagttgtcgtttggacgtaactcatgagcgcccgcaattctcgttccttagctacttggcgatcagcaaaaatcgttgccacggtcgttgggggagttccttgtagccagtatgactgcaaaaccttactacgatcatcagtcggtggctgctgcgcttgataacggctataatcttgctgaatttcattgggagtcgcagccgtcaattcgttcaaattccgcaccaggttttcgtcacctggtgcgtacaacataatcgccatcgcctgctgaccatcacgacctgcgcgcccaatttcttgaacatagtcggccaaagtcgtcggtaaatgatagtggatcactaagcgaatatcagctttgttgatacccattccaaaagcagatgtagcacagatcacatccaattgtcctgccatgaactgctgctggatcttgaaacggtcatcagtcgctaagccggcatgataagccgcgacccgtaacgtggttgtcgttcgtagccattccgctatcaaatcagtttgccgcttggaagtaaagtaaacaatgactggtccgcgcgcacttgtcactaaatgttgcaaggtcgcgcgtttactagcttcatcattgacctgttcgactgctaagtaaatattaggacgattaaccgaatataagatttgctgggcatctggaacggttaattgtgtcaaaatatcttgtcgaacgcgttgtgtagccgttgccgtgagcattagcgttgtcggtgcctgtaaccgttgtcgaatttgaccaaggcgacggtagtcagggcgaaaatctggtccccaagttgaaatgcagtgggcctcgtcgataactaataacgccagttgcacttgcatcagcgctgtttgaataatgtcttgacccaacatttccggcgaaatgaacaagaatttaagctgccctaaatgattcaacagatactggcgagcaccataatctagttgggaggtcaaagcagcaacttgcttttcgccttgatagtttaagcgcgccacctgatcttgcatcaaggaaatcagcggtgaaaccaccacaactagcccgggcagtgcggtcccgacgagttgatagatcaatgatttgccggtcccagttggtaacactgccaagacatcttgacctgctaataatttctgaatgacggctagctgcccggggcgaaattcatcgaagccatatttcgttttcaacagctcatataattcatcttctgacatgctgacacctcataatctgaaatagccgaaattcaaaaaaatctagcgtgggtagcgcagcttgggcctcttggaatgaccagtttgcaatgtcaggctgggctgcaaagatggtggccaactgctgagttatttcatgattcaacaccatttcaaacggaaaatcaggcgaccaaatcgccacctccaacaagtgctcccgtaccgtactcatctttaagtgccgcgtctgcgcaattgctgcaagttgctgggtcttcaagaaagcttggtaagtttgctcagcgctttgactgatggcactcgcttgagtgagcactgacaacaactgggaaaatggatcacgcgggtgtcgctgaatccaagcaatccattggcatatcacgtctgtgtgcatcaagctagcctcccagggttgtcgacctaattgtgccgctaattgctcattagtcagtcccggttcttgataccccgttataccttgaacaaacaccgttggcaactctgggtctgccaaactcgtcaagaaggcagtcaaggccgcatgaatttgctcgccaagttccaccttcgactgctgacgtagccattgtttgacctgggcttgaatccccggatcagtcgtcaccggataataatggcgattatgatgtacgagttcggaaacgacttgtagggctagctgactgacgattctaaatcggcggacatcagtggtttgaaatacttcaaaattttggggcatgtataaagtctgtcggagtttggcttgccgatgttcccccgcctgcgttaattgccagcatcccgtggccgtactcgtcaattgaccgttttcagtcaaagccgcagttgctgccatgaaatcttccaagggaacctcgtggcaactgtcgagcaaatccaagtagccggcagttaaccccgcaaaaagcgtggagaccgtacggcggccgcgcaagacattgaataggccctttgctcgtcgcggcgtcgtactgaataacaataaaacgtagtctgtaaacacgctaaggcctcccttaagtcttgctgttgtgattgttaattgcgcactaaatgtgccagtttttaaattaagtcgtgatcagcccaaatttacgtgcgtcagtgtcgctgacagtgacccgcgacacagcatagcggccgacagctttttaatctttctaagccttgattgaaacttcgaattcatcaacttactgccacattaaagctcatggataaccatccgccaaccggcagtgtgcgtctttaagaatatcacggtggcaccaatataaaaaggcagtcaccctgcagttacgcaattagtgaccacccacattattttaacgacttagattaaattcggctcataagctgattatggttgcctaaccacttagctaatcgctgatagaccagccagaagacgttgcccactagcaatcccttgatcaagttaaatggaatgactgccactaacaccactgtattcagcgacatgctgagcttcatacccattacttgcaaatagaatggcaaaacaaacgttaagttagccaacgattcaatcaccaccaggccgattgtggcgaccacaatcgccacaggcatccgccacttgggattgccccgatagtaacgaagtactaatgcaaatgctaaaatcaatactgccgtacctaaaaaactagcaaaagaaccgattaagtcataaatggcaaagcccatcatggctgaatgtaggagcagtttgatgatagtgatgacaaacgcgcccccgacaccaaagagaaagagcccaatcagaattggaatatctgaaaaatcaatcttcatccatggcgctaccggtaaaatcggaaactccagtaacattaaaatatacgcaatggcaccgagtaaggctatgcccactagtcggtgtaacgttgtatgttgcataacgcaccctcctatgggtcatcttcaatgaaccgcattaccatttgttcaactaaaaaaagtccgcccgatcacactaactgtcatctgggggcggacttacttgcaacgcttggcaaataagctcgatcttctttataccagactttactgtcgactttggaattgcaccaaatcactatgcacacgcataggtcgcgggttattaccgccggtcgggaatcacaccctgccctgaagatgaaccaatatttatttttacaaattcattttaacggctttcgttcaaaaatgcaagcgctatcgttcaccttttaacttactaatttcaatcggcttcaatttacggtattcgcccggttgtaagctttgcaaatcgagaaccccataacgttcacgtttcaacttagtcactgggtgacccactgcagccaacatctttttcacttggtggttatgaccctcgtgaatcgttagttggaccagcgcattattcttcttgtgatcactatctaacaagttcgacttcgctggagctgtcttacggccatcgatttcaacacccaagcgcaattgcttgagatcagcattggttggtaccccttcaactttggccaaataagtttttttgacttcgtacttcggatgagttagccgattagcgagagccccatcatttgtcatgatcaacaaacctgaagtatcgtaatccaaacgtcccaccggatagattcgttccggtacgtcttcaaagaagtctaataccgttttacggcccttctcatcatgaacagttgtaacgaccccccgcggcttataaaataaataatacacgagtttttctgcattcaatggcacgccatcaacctcgacatggtcactaggctcaacctttacaccgagcgtggtgaccgtcttcccattcaccttaacgtgaccagacgtgatcaacacttctgatttacgccgcgaagcgatgcccgcttccgccattaccttttgtaatcgttctgccattattcatcctcacgttctgcttgtaatttatcctgaaatgcatttaaaaagaggtctgtctctggtgccggatgctcagcgtcacttaaagcagctaggtcaatcgctggtaagtcatccaaagactttagtccaaaataatctaagaacagttccgtcgttccgtataaaattggccgtcctggctcacttaaacgccccgtctcggtaactagttgtcgcaaaaccagcttttgaatcgttgatccactgtgtacgccacgaatctcatcaatttcaatccgcgtcaagggttgccgatacgcaatgattgctaacacttccaacgatgcttgcgacaaactcgtggtgagtggtgcttcaaagtagcgctttaacaccggcgccaccgcggccttagttgctagccggtaagtattcgccgttgataagatcattaaggcactgtctgggtcggcttgatacttcgtggccagttgtgtgagcatcgttgtaatcgccggcttagcaaaccccgtggcgtgctcgatttcggcgaccgtgatgccctcatcgccagccacaaataatagtccttcaatttgttcaatgttcgtcatgctgttcatcctgtcgtaaatataaatgaatcggactcagtggctcagcttgctgcagcgccacttgatcctgcttggttaattctaacacagccataaaggttgtcactaacatttcatcgctggcactaaccgtaaataggtcggcaaaatccagtccttgtggttgatgttgcaattgcgtcgtaatttgtgtcatccgctcatcaatgttgatggtttcagccacaaccgttttcgttagtggccgtacccgccgccgtttagccactaattgccgaaaagccgcttgcagatcatctaatgtaatccccgcagtcagcttgggcgcactcagatcagctggtactaacatcgcttcacgcgtaaaatgttgatggcgcgcctgttctttttctcgcaattcaccagcggcttcctgataaaccttgtaagccaacagttcagctacaagtgagtcacgaggatcatcgtcctcattatcttcgtccatctcatctggttcaggctgtggcaataagaaacggctcttgatcgtcatcaaagtcgcagccataaccaaataatcaccagcaatatctaattttagcgctcgcatagagtgtaagtaatccaaatattgctgcgtaattgccgcaattggaatgtcataaatatccatcttgttttggcgaatgaggtgcaacagcaagtcgagtggcccctcaaactccgaaatcttaatggtgattggttgttgttggttgtttgtcacgattacgctcccacgcgccaatgatcggcgccatttctaaagttcccatgacccgttgcttgggatataacgcggccaactcatccaacatttgatactggttggccgccgtccgttcctcgggtgataatgaatcgtgatgcagtagaataaagtcactgccgacttcaatgccgataataccacagaaatcgccgtcaccttgccgccatagtaatagttggtggtcttccgttgactgataccactgcatctcagtttgtagatgaattaggtccttaaaatctggaataaatgacagtagccccattgctaccttttcataatccttccgatatttaacgagcacggtattgcctcccttgactgcttgattccgcaccgcatctatgcccgcggatgatatttattataaacctcagctaggcgttttttcgaaatatgcgtataaatttgagtcgtcgaaatatcggcatgccctaaaagctcctgaacgacacgcaagtccgcaccattttctaagatgtgagtcgcaaacgagtggcgcaacgtatgcggcgtcacgtttttttcgatgccagccgccttgacttctgccttcagatttttccaaaccccttgccgacttaatttaccaccgtgattattaataaacaaatagctattccggcgtttggcagagacgagtttgggccgagccgtttttaaataacgggtaataaaatcaatggcaacatcaccgataggaatgatccgctctttatcacccttaccgattgtttgaatcaatcccaagtctaagtgcagatcatccatcgttaaattaattgtctcgctgactcgcagaccggtcgcatacatcacttctaacagagttcggtctcgtaatcctaacggggtattcaacttaggcaccgctagcaaccgttcgacctcgcgtggtgacaatacttgcggtaaatgctgcgcccgcttaggcgtgtcgatttttagcatcggatcagtatcgatagcgtgcatctgtgctaaatattgaaaaaacttacgtaaactagaaacactgtgaatgattgtatttcgcgatttaccagcctcatctagatactgtaaataattcaataggacgtaccgatcaaccacccgatagtccgtgatttgctgactcatcaagtattcgctaaacgtagtcaggtcctgagaataactcttaatcgtattttcaactaacccccgttcaacacgcaaaaaatgcaggtaatcagcaagctggtcctgcattttttgatcaatcgtcggcttgctcatccgcattttccagtaacttgatctcgcctggttgttgactgatcaagcgttgcttcaagagattacccacagcgcgcttaaattgtgatttgctgataccaaagtaattccgaatatcatcgggatcactcttatcccaaaatggtagcgcgtggtcagcttgatgttgcaatgctgctaataacatttgggcatcatcgccaatctcttcgtatccccgcggcttcaaggacaaattcaattcaccatcgcgcaagaaaccaatgacccgcgccttgacgtgttgccccatgcgtggttcctgttcacgttctgacggatgaacaaagcccagatgattgtcatctgtaataaccgacgtaccggccatcttcaaacgaaaaacggtcgccatggtatccgtattcttaacttgggcccgatcatatggcttggcaattgcttcaaaatccgtcaattctgccagagtcgcccatagccgttgtttattgtcacgggctaacttaacgtataaacgatcatcttttttaggccatagtcgactgatggtcggtaattcgtctaatgacaccaccaagtccttattcggtaacccaacatcgacaaagacacccagatcatgccgcgtccggacaaccgttccccatacaaagtgatcaaacgaaatttccgggacaaaccgcgtcatctgcagatgatgatcttcattctcataaacaaaaccttcgtaaagcccgccaatgtgcaatggcttctctggttcagttttatcgacccacaacgtctgtccatcaatctgtacgaagtatgcttcatcgttttcatcggttaccttcgccgtaaccactgttccaataatactatccatgtgataactcctctaatatatccgtctataaatatcaacggatggttcttttaaattactgtaagctcaaatgtaagacttgaataatgcaatacgttataccagccgcaataattggcccggccgcgattcccttgagcaaaacaacacccataatggtcccgaatactaatgccacggtaatctctggtgtcgctgacaaaagcccgacaccgtgaaatgagagcactgaaaccaacactccacatgcaaccgcaatccagccaactggcgacttaaacgcatgccaaaggtcccgaaatccaatctgaccagtcgcaatcggaattaaaattgcgacggtaatcaccgtcacaccccaattgattcccttctgaccaatcgtcgtcagcaatttactcgtattaggaatcaatttgataagcaacacaaccacggtcgcaatttgtaaggactgattttttcctaaccatgccaccactaaaatcgctaataaaaataaccaactttccatacgacacctcacgtgttatcaattgtaactgaaaatggcccgaattacgaggggtgttggtcgttactcaccaatttcactatccccccctgatcaataaccgattcctgttctttaatttaggcgggaacagggttaaaaggtgccaaatcgtttggattccagctcgtcagcaaggttcgtcctattccgacttacggggctgggtgacaattgccggaacgtagccgacgtcgatttgagctcacgcagcaacccactgtgcaatctcaaatacgagtcttattctaggccggaagcaacccacttccagccaagaataatttggctactgagcattgtcacccaacccctccagtcggtaagccagtcgaatggctgatgaacgaccacctaacttggtgcaacttgtcgctgaacgggtttactacttagaattttgaacatgcgttaatgctgtctcaattgttttggacacctcagtactaatacggtggaattagaaataatcgtacaatcacaattatattatcaaactaactgttgtatgataaaatcgctgttttaaaatagcaacatctaattcgttcaatgctgggtccactcatgtcagccattcgaataccatcccgactggaaggcgtttcggccaatgctcagcggtgaaattccacttagcaagcgtttttggcttggttagtggaagaccagtatttaagacgtgattttcggcttaaatctgtgtccaccgcgttccagcaattggccgaaatgcctggaagtcggtgcaggacgcagctagctaagcaaatttccgctaagtagatctttttccagcgggcttaagctggatcatttgacgttgacgatttggcaccttttaaccatgtttcatactaatttaactgggagtgaagcactttatgtaatataaaaagccgccgcaaagcgacgacttttcaatatcaaattagatttgatcttaaagggcgtttgaagcaccgcggtatacaaggccacgacgtgaatcaactgtgatcaattgaccatcagcaataacactagtagcgtccttaacaccaacgataacaggaattcccattgagataccaacaacagcagcgtgtgaagttaaaccaccgttttcaacaactaaagcactagacttttcgattgctggtaagtagtctttgtcagtcgtcttagtaactaagacgccaccttcaacggccttgtcgatagcttcttgagcagacgttgcgattacggctttaccgataaccgtttcatcaccgacaccttgaccatcagctaacttagaaccaattaattggatcttcatgatgttagtcgtaccacgttcgccaactggcacaccggcagtaatcaagattaagtcgccttccttggcaaagccaagttcaacagccttagaagcagctaaatcaaacatgtcatcagtggtttctggtttttcagccacgattggttgaacaccccagttaaccattaagccacgttgagtccgttcgtcaaaagtgattgctaagatatcagcatttggacggtacttcgaaatcatcttagcagtgtagccagattcagtcgcagcaacaatcgtcttaatgttcaagttcttagctgcccgagcaatcgcaataccgattgtttcagtaacactagtcttgtcgaaacggtttaattgtaacgtaccgttttcagccaaagtgttttcagccttttcgtcaatcttagccatcatggcaacagattcaacagggtaaagaccgttagcactttcaccagaaagcatcgttgcgtcagtaccatcaaagacagcgttggcaacgtcagaagcttcggcacgagtaggacgtgggttttcttgcattgagtctaacatttgagtagccgtgataacaggcatacctaaagcattacacttcttgattaaactcttttgtaccaatggcacattttcagcaggaatttcaacacccatgtcaccacgagcaaccatcaaaccatcacaaaccttaagaatttcatcggcgttgtcgataccttcttgtgattcgatcttagggaagatttgaacgtgttccatgtgcttttcttcaagtaattcacgaatgtctaagacatcttgtggcttacgaacgaatgaagcagcgatgtagttgatttcatgatccaaaccaaagcgaatatcacttgagtctttttcagtgatcccaggtaagttgattgaaacgccaggagcgttaacacccttacgtgagcctaaaacgccggcgttttgaacagttgtaaccaattcgcggttagcttcgtccttttcgtcgatcttcatatctaataaaccatcatcaaagaggacatggccacctacatgaacatcatcatagaggttcttgtaagtaacggcaatcttatcatgggtcgtatctaatgaatcatccatggtgatacgaaccttgtcaccgatcttgtattcagattttccgttagcttgaacggtcgtccgaatttcagcacccttagtatcaagcatgataccaacggtcttacccgtaatcttttctgcttcgtgaactttgtttaagcgatctaaatgttcttcatgatcaccatgtgaaaagttaaagcggaaaatatttgcgccggcttcgattaatttaacaatagtgtcagtatcggtgctggcaggaccaagtgttgaaacaatcttggtttttttcataagaaaaatctctcccttgaaagtttttataaaaagacattaacgtcatttttatcaaattaaaataagaactaacatgccatgattacttgaatgaaatttcttcattcaacttatctaatgacacttcaacgtcatgcttagattcaaataaatctaagatgttgtggttgactaattggttgttttgaatcccaaccgctaagccacccttgccggcaagcaagagttccacagcgtaggcacccatcttgctggccatgacacggtctttagcagttggattcccaccacgttgcatatgagcaatggtattcccacgagcatcaaagtcaccatattcggataacttctcaacaaactcctgggcacccatcacaccttcggctaacacaatcaagttgctccgatgaccattggcccggttatgcttaatcttgttggcgatttcttccatgtcccaatcaacttcggggaccacgatagcagtcgcgccgattgaaacaccggaccataaggctacgtcaccagcgccacgacccataacttccacaacgaaagtccggtcatgactatgagccgtatcataaatccggtcaagagcttgcacgttggtgttgacagcagtgtcaaaaccaattgtgaagtccgtgtaaggaatatcattatcgatcgtccctggaagaccaatcgtgttgtagccgtgttccgttaagcgcaatgcgccatggtaagaaccgtcgccaccgataacaactaaagcatcaatcccaaaccgcttcaattgttcgatcccttttaattgaccttcttcatgggcaaattctggataacgtgcggagtatagtaaagttccgccgcgttgaatcacaccatctaagtcggctgcttctattttgtgaatgtcaccggcaactaatccagcaaagccgtaattgatgccgtatgcttccaacccttcagccattgctttaccagcaactgcacgaacggccgcattcataccaggagcgtcgccgccactggttaaaataccaatgcgtttcattttttcacctcaggcaataaattgagttcgtaactccataagtgattctaacacttttcacgtggattgtctgttattttctaaaattaaatgcgttaaaaaacgccgtcgtatcaagggatagcgttcttcatcaccacattatcgcgacctaataaggttgtaagcgctccaaccaaatctggattttctgcgacccaatactgtgaatttagttcaaccgttcgatgtgctgctaccgagtaaattagaactggattaggacctcgatattgacttaagatccttaaaatttccttttgcacagtcgccgttgcttgctcaggttgcaaccgcaaaaagagttggccggttggtttgggtaattgttccgccaactgccaggtgtttacgatcacttgcaaatcccgctgttgctcgaccttaccagtaattaacacgattgcttctggtttcaattccgcctgaatccgttgataggtattgggaaaaatcgtcaagtcaatttcgccggacaaatcacttcccgttgcgaatgccattggttgaccacgtttggtccgaatcgttcggaccttagtaatatagaccagtatttgtgccggttgttcactcgtgagcgtgctgactaattgtgtatgtcgttgttgcgcgagccaatcatacgtttccacagggtgccctgaaacgtacacaccaagatactccgcttctttggccaatcgctcacctaacgaaagctccggctgttttttgatcttaggggctaatgattcaaataaactcatactgccaccggctaactcggcacttgacatcaattcaggcacactggtcagtagctctgcacggttcaaaccaaagtggtcaaaagcccccgcatagatcagtgcatccatcaaatcggctttgagccacttcgcgtcaatccgttgcatgaactgctgaagacttttaaacggtccgttcgcctgccgctcgtctaacacactcgcaataaagtcacggcgcaaccctttgattgagctgagtccaaacacaatggcttgaccattccaatcaaagtattgaccgctccgattaatatccgggggaataatcgccacttggtgctgacgagcttccgctagatactgtttcagcttcgttccattgcccaacacagaattcatcaatgaggtaaagaacgctccggaataatggactttcaagtaagcaagttcaaaagccatcttactgtaggcaatcgcgtgtgagcggttgaaaccatagttcgcaaattgttcaatatattgataaacctgtgtcgcaactgcttcggaataaccattctgttgtgcaccagcgataaattgttgccgcattttatcaatcacagcacgttttttcttgctcatcgcccgccgcaataagtcggcttcacctagtgtaaaaccacccatgaccgcggcgacttgcatgacttgttcttgatagaccagaataccgtacgttggtcctaagatgggcgcaagttgttccgccggataactgaccggttcttggccttgtttgcgggcaataaaatggtcgatattttccatgggccccggccggtaaagtgcattgaccgcggcgaccaattcaaagttatccgggtgcagacgccgtaacacgtttcgaattcccgccgattcaaattggaagactccggtcgtgtcgcccgcctgaaataatttcagggtcgctggatcgttcaaatcgattttagtaatagccagtggcttgccagtttgacgctgcacataatgtagcgcacttgccatcaaagacaaattccgtaatcctaagaaatccatctttaacaaaccaaccgcttcaacagtgtccttagtatactgggtcatcatcatagtttcactacctgcttgtagcggtacgatctgaattaatggtttttggcttaataccaccccggccgcgtgtgttgagtaatgtcgtggcaacccttccaaacggcgagctgtttcaaataataatttatttttagatgaatcagcaacgaggttttgtaaccgttgtgagccctggtaggcctggtcaagtgtaatatgcaattggtttgggattgcggcactccagtcactcatctcgtaagttgagaggccaaacacacggccaacatcgcgcagtgcttgctttgctgccaaggtaccaaacgtaatgatttgtgcgacgcggtcatgaccatacttatcatgaacataattaaggacctgttcacggcgattatctggaatatccaagtcaatatctggcatattcgcccgtttagcgttcaagaaacgttcaaatagcaagtcatattttaagggatcgacatccgtaatattgagtgcataagcaactaatgagcctgctgcagaacctcgcccaggtccagttgtaatctgggcctcatgcgcaaaattcatgacatcccacacgatcaaaaagtaatcatcaaagcccatctgatcgatcacggtcagttcgtgatccaaacggtcctggtaagcctgctgatcaaccgacggcgttattgccgccaatcgctccgttagaccagccgtgcataactgccgtaaataaacgttcgctggttgtccagcgggcgttggaaattgcggcaactgtggctgttgaaattgtaattcaacttgacactgtgccgcaatttcggccgtagccgccaccgccgtcgtcaatcccagttgctcatagtcagccgttacggtgttggccggccgtaagtagtgactgccttcgataccttgtaacgattcgggctgttcgatctgttggccccgatcgattgctcgcaaaactgaaacggcaaagtaatcctttgcttggacatagtcgactggatctaacgcaactaccggcaattgatgctgttgcgcaaaggccgtcattgttgttcgcaatgcaggggcctgatccaaagaaatccctaagtaaaggctagcagagtcgaccgcctgcctcagcgtggtaatccaatcagcagctcgctcagcggtgttttgtaacaacagcgcagctagttcactgtctttagccggggttaagaccattaaatggttcaaataaggtaatacggctgttagcgacaatcctgcatccgtcgccgtctgcttcatcgtcgacaaccgcatcaagttttgatagccagcttgatctttcgcaagcacgaccagactaaacgtttgcgccgttagttcacgtcctaataagttcaatgttattcccaatatcgggttaatttctgcctggcgacaggcattataaaaatcaacaataccgtacatgatatcaacgtctgttaaagccaacgcggaatacccctgttgcttggcagtttggactagctcactaactgtactagtgctgtgaagtaaactaaaagtactcaatacttgcaatggaacatattgtgccactatcgccgccccctttcataaaatatcagctttcaactcgcatcgaaaacgtaacatcagatcagctacgtcaagcccgctccaaattgatgggtaaacaaagaatttaccagtctattcaatgccagttgatgaccaatcttgtcctcagatatattcgttactattcattataccaaacagttgttctaagcggcagttttaagtcatcagataacgtgcacggttatttttagatggataactagggtttcaccgccgtctcgtcgtaattatatcaacctaattaaagccttaatatcccgttattacctaattgctttttcctgtcggtgtgttaaaataattttcattgggaggtgtcggaaaatgatgagacaacttacgattatcttttggagtgtcctcttcggtgaggtcatcggctacatcggtggtgctcttgaacagttggactataactttggtgaaatcggcatcgttgctgcaattttcgcgctagtcgtggtcaacagcatcacttatattactaatcattcccaacccgctaaaggttcagataataagtaattaaaaacaaccaaaggctttgcttcgcttagtctcagcacaacaaaaaaagacgagtatcccgattgcggttgctcgtctttttttgttgtgtgcttgacgcgaaagccaactaaaatgctggtacatacccaaccctaacattcagattaatggcgcttacgatccatcacttgctttgagcattttggcatatgtctgctttgcgcgttgtgctgctgcccaaaatgccaaattggccgctgataaagaaccacgttgtacattaatttttcaattcattttttgcatactggtcaaaccttttacgatcgtcgtccatgttcgcttactcctcgattttggagtagcttaacacgacagcgtcggcggtaacaactcttttctcagtatgaggttaaacgcacgggcgcaaggtccccctcgtccgaagctaagcgcggctaccatcatcataaaccaaagatagctgcctcacacctacacgatcaagccatccagaatcataggctcaaccaagtcacaataataatccgcctaaaaaaagctggcccgtgagcatcgcaaggtgctcacgggccagtttttattggcccaattatcgtcactgaaacgcattatcacgcgttcaaatcagtgattacgcttatgccggctgggtcgattggttttcgaagactaagtgatcgtccatcaaattaatggcgactgtcgattttggtgccacgcgccccgcaatgatctcttttgccagcggtgtttcgacgtgattcgtgataaagcgccggagcggccgggcaccgtatgccggttcatacccctgcttagcgatccacttcttcgcttcgtcagaaattttcagtgtaatctcacgatcttggagacgggcagacaaccgatcaatcaatttcaccacaatttcctcaatcgcgcccaattgtagtggcgtgaacataatgatgtcatcgattcggttcaaaaattccggtttgaatcgactttgaaccagctgcataacctgttgatgggtgtcggccgacaagtgaccctggtcatcaacccccgccagtagcaactctgatcctaagttcgacgtcataatcaagatggtatttttgaagtcgacggtccgtccttgaccatccgtcaaccgaccgtcatccaatacttgtaacaagatgttaaacacatctggatgcgccttttcaatttcatcgaataacacgatcgagtacggattacgccggacagcttcggtcaactgaccgccttcttcgtaaccaacgtagcccggtgccgccccgaccaatcgcgaaacggactctttctccatatattcactcatatcgatccgaaccatatgatcatcggcgtcaaacaaattctcagccaatgctttcgctaattccgtcttaccaaccccagttgggcctaaaaacataaaagaacccaggggacgattaggatcttgcaaaccggcccgcgaacgtaatacggcatccgaaacggcatcgaccgccgcatcctgaccaaccactcgttcatgcaaatggtccgccaagtgtaataatttctcccgctcaccggcaaccagtttggctactgggattcctgtcatccgggaaaccacgtttgcaatctgatctggcgtgacggattcctcaactaaccaatcttcatgatgatcattggcttccatggccttcaactcttgttccagctttggaatcgtcccgtgctgcaacttagctgcttgttccagatcataattattttcagcattttccaagtcgtgcttagctttgtctaacgccgactttttgtcgcttaacgcttggagactcttcttttcactgtcccagcgttcggataaagtccgctgtttttcctttgcgctggcgagttctttttgtacatccgctagccgtttaacggaggcatcgtcagtttccttctttaaggcggcttcctcgacctctaaacgcattaattgtcggttgacttggtctaattccgttgggttggagttcatttcgacccgaatttcagcagaagcctcatctactaaatctaaggccttatctggcaagtaacgatccgtaatataacgatcagataacttggcagcggccactaaggcgttatcatgaatccgaacaccatgatggatttcaaagcgttcctttaagccacgtaaaatactaattgtatcttcaacactcggttcagcaaccaatactttttggaaccgccgctcgagcgccttgtccttttccatgtactgacgatattcatctaacgtcgtggccccgatcaaatgaagttctccccgcgccaacattggtttcaacaagttaccggcgtccatactgccttctgtcttaccagcaccaacgatattatggatttcatcgatgaacatgatgatctgcccatcgctcttcttgatttccttgaggacggctttgagtcgttcttcaaattcaccacgatacttcgccccggcaatcagggaccccatatctagcgagaacaacgtcttatcttttaagttctccggcacatcaccacgaacaattcgttgcgctaggccttccacgatggcagttttcccaactcccggttcaccaatcaagacaggattatttttcgtctttcgtgacaagatccgaataacatccagaatctcttcgtcccggccaattactggatcttgattcccctggcgcgcctgcttaaccaagtcgacgccgtacttttccaaagcttgatactgatcttcctgattacgtgacgtgacccgttggcccccgcgaatacgatcaacggcattcttgacttgtcctgccgtgatgccttgctgattcaagtatttggtcaactgatcaccagtttgatccatcagcgctaaagccaaagtgtcggtcgcaaggtaatcatcacctaacgctttgcgcttagcatcggcagcctgcatcagcgtagctagactactgctcatactgccaccgtactgaacgttaccaccgctaacaacggcaatgtcatccagctcacggtcgagctctgtttgtaattggtctaaatcagcgccggcctcactaaagatctgccgaaccagttcgcctggttgcgttaaaaatttaaatagatggggcaccccaatttcttgatggcgccgtgtttgtgcgatttgttgtgcctgttgtaaggcttgttgtaaactttctgtaaattgttctggattcatatttacgtacctcctcaaaaacggtagcaaaaaggcagccgtcatagctgccaatttttgtttgacctttattgactattagagtataacccgtaaggtcaaacaaggtcaaggatttagtcctggtcataattatcctgaacgatttgtaagacaacgtccacggcttgggccatcacttgttctgaaacgtattcaaaccgaccgtgcatgttctcaccaccagcaaacaagttcggtgtcggcaagcccataaatgagatcttggagccatccgtcccaccacgaaccggataaatggctggcgtgataccgagcttgagcatggcttgtttggccaattcaacgacccgcatatctttttcaatgatttcgcgcatattgtaatactggtccttcatgtcgaccttgatccgggccacaccgtcagccaaattcagccgatccgcaaccgccataaataaccgtttacgtgcttcgaacttatcgcggtcatgatcacgaataatgtaagtcatcttagcgctgtcaacggtcccgtctaaactaagcaagaagaagaacccttcacggccttccgtgtgttccgggacatcatgtgcgggtaacgccgattgaaaatcaacggctaactgcaaggcgttgaccatcttatccttagcttcccctggatgaacgttgacacctgtaatcgtcaccgtcgcttgggccgcgttgaacgtttcatactccagttcaccaagcggaccaccatcgacggtgtaggcataatcggcgccaaaggcaggcacattaaagtgatcagcaccagtcccaatttcttcatcgggaccaaaagctaaccgaatcttgccatgtttgatctcaggatgggccaacaaatattccgcagcactaatgatttcagcaacgccagacttatcatcagctccaagcagcgtggttccatcagttgtgatcagcgtgtgaccagcatagttctttaagtttgggaagaccgccggatccagcacatagtccccgtttccgagcttaataactgattcaccgtcataattgtcaacaatttgtggattgacattttccgcgttaaagtcagccgtatcaatatgtgaaataaagccaagagttttaacagctttgtcactattcgcaggaatcgtcgcaaaaacgtacgcactttgcgcatcctgttcaacatcgctcaagcctaaatcagtgagcttactcattaattgctttaaaaaggccgtttcacgtggtgacgaaggaattgtcgttgattcctcatctgaacgactattaattttgacaaaggttaaaaaatctgaaattaagtttggatattttgacatatgataacttcctttccttattaaagttcatgattaacttagatgaaggtaaacggatcagtattcagctgagacgccacaatctcgattggccagccagcttgtacacgccactgatcaaacagcttagtgagttgtgacttacaaatactctcgatatggtggcctggatcaatgaccgtcaacccggctgccagcatatcatgaccggtgtgataatagacatccccggtcacgtaagcttgtgcacctgctcgcaacgcttggggatagaacttaccaccatcgccgcccaggacggccacacgggtaatccgttgtcggggatcggcactgactagtcgcaggccgctgacaccaaatacttgcttacactgttcggcaaacgcctgcgctgataacggtgtcggcaaatcaccgactcggcccatataatactgatgaccgccagacaacagtggcacgacctggtaatcccacgtgtcagcggctaagtcattaatgcccgctaccgcagttggaatctgatcggctagtaagtcgacgctgaactgttcacccgagttgacagcgtaacgatctagcgtggcacccacggtattcgttaagtattcctgtaccgtttcaacttgattggtcggtaccgttaaagtcaacttaacagcctgtgcccgatacccaggaaccaacccctgcacattttgcaagtctagggccgccgccagccaatcgttcatgccgccctcagcacagtccagattcgtatgggccgcgtacaccaagatgtggtgagctgcaagttctgcatacattgctttctgaggatcctgataatcaagattgttagccggtcgaaacatgacgggatgatgagcaaaaatcatgtcagcaccgatcgtgatggcttcttggacaacttccggccgcacatccagggtaactaacaccttgtggatgtcctgatgaggatcgccgatttgtaatccggtgggatcatgctcccacttcaacttgagtggcgcaaatttttcaaaacgcgcaattaattcacttgcttgcatccgtcaagactccttcaatcaatttgattttagcgtgagccagcgctaactgttcctctggtatcactttagcccgttgcatttgcgcaaccgccgcatttactcgttgtaactcacgttgccacttagcgataaacaccggcgacttctcagctagcagaaacgggccaaacatctgttcagccgtcgtatacgtcacctgatgatcaacccgatcagcacaaagaatctcataagtatggccatcttcagctagaattcgttcagctacaatttgaaactgattggccgccagccattcccgcacggtcgcttcaccaacattaggctcgagtaccaaccgttgaacaccggcgagctgggtcggcccctgttcaagaatatggcgaatcaaagggccccccatcccggcaatcgtgaccgtatcaatacgatcagctggttcaatcgcagcaagaccgtcagctagacgggccactaagcgatccgttaaccccagtttttgaatctcatgacgcgcattttcaaagggcccccggacgacttcaccagctacaccataactaatttgatgatttaatgcgagattagctggcaaataagcgtgatctgacccaatatcggccacgcgggcgcccggctgaacgaaagcgccaaccgttgctaatcgttttgataattgttttgcatccacatacagttcccctttaattcgggaagatttacccacacgactaactttcagtggttgtggtcaaatccacccggttcaattgttttaattattcagtttaactaaccacgcacgtcactcgctatccttagtatgcaccaaaatcgaaacgtgctggtcgttgaattacgggtcggctctttatcagaaatacccaacgaggttcaactaagatcatggcaatacccaatggcctggaagttagcagtctgaacaaaggtcgcacactagattagacctttgttggccaatcatctttgaccttaaaaaccaacgcatttcaatggtgattcaggatagcacccgtatcaccgtacgttactaatcatattttaccatgcttcactgtgaatacgcattcagctggttaaattttcctgaaaattcctaagctttgttcaaactaactaaaattctattaatgcaagtttggatgacaggcagacatgccataatatggctaatgtcgactggcaagcgacatattatttaatgaaagaaagtttgattaaccatgcgaaaacgtcttttaacgacgtcgccatttttgactggcctaaaattattagctattctgccgccggtaggtatcggatggctgatttatttaagccggtggcaatggctggcgttactcaaacatccacgacaattcagtcggcacgacccgttgctaggttttatcgtcctattaatgggcatcacgacgctcaatctcaatcaccacgattatcgtagtgttattctgtctgtcttaatgctttttgtattgggcaatctttggttgttgtgtcgtgagtccacgcagtcgattgcttggcacgagcttcgtaaatttatcatccaatttggcttgtatattacaattagtggttttgctttccactggcttaaccaagtattgacattaccaacgtggctgaagttcatgctgggtgacctattatggggctatgctgctaatcagaatcgcttgttcgggtccgcctataatccaaatgatgcctgctgtttattattgattgccctcggcttactattgacacagttaagtcatggaagcgttcaccccttcacgcgctggccgctcataaactggtttttggttggcttactttgtgtgggcatttatcaaaccaaatcgcgcacagggctcatgatcatgatagccattctgatcatgacgacttaccagctttgccgtcaccatcgcattttggttacaacaatattgattgctggcagtttagttgtctggcacgttttccccagaagtgcttcgaccatcaccgcgcttcaaagtcgcttgacgatttggcacaacagcttcaccgttttcaaacaagccccgtacctcggcgtgacgtattttggctttgcccggcactatttgcaattgacgggaacctacgtcccacacgcccacgatattttgctcatgctactagcttcttttggtatcctaggcggtgccggctttatttacttagtcctcagcagtggctggcacttaaccaaatattggcaccagtatcgtacgccaaatttgcgttactttatgatgactttgcccatcattctagcctatggattgacggacttcgttttatcttctatgcaagtattgattattattttgctcattatcgcttgttggcaccacgaacaacaattgcggccaatcattagccctcacaagtatcagtctccacttatctgacacttttcatcgccatcaatttcgaacgggcagtaatgccccatttcaaaaatagtgtgcgctgtcggtcatcaagccgcaacacacactatttttagcgtaccgttaaccaaatcggcgatatgccaacacagttaacggcataaaaatcacaataataaggaaaccacttaacagtacaccaaatgcatcgggcccccaatggccagtccgcaaaattgtgcgcatcgcggtaattgttagactgaccggattcaatcggacaattgtttgcaacaaatgtggtaacgtcttagtcggaataaaggcgttagataaaaaggtcagcactaaaataatgatcattgacaggctgccaatcagggccgcatttttgaccattaaaccaactaaagcaaagacccatgaaagcgaccatccaacaaatactgccagcagtaaaacgccgatcaatactagtggactaacaatgggtcgccagcccatcataaaagctgtcaccagtgccatcaagccagaaataagcaatcggaaaacatcccccactaactgaccggctaacggtacgatcggtgaaatcggtagcgtcttgaagcggtcaaacacccccgcgttaatgtcttcacgtaattgctgtccggatcccgatgctgcattcaaaatactttgaatcaaaataccggtaactagcattggtaaataggcctggacactgcccgcaatggccccaccaaacaagtaaccgaataatagggtaaaaataattggttgtatcaccacgtcactaacattatctggattatgccacatttttaataagttccgatgcgtcattgtcaaaacatgacttaactctgctggttgtttgatttccatcgctttgacctcctctaatttgtgcccacggtcagtttaaaaaacacatcatcgagcgacggcgcgtgcatcgcaaagttagtgaccgtgatttgagcagcttgtaaccgcatcagaatttcagtgaccggcgtcaagttagcggtatccaacggcactgttagggtccgttccgcaacacggacatcttgaccgagcatgacttgtaagatatccttagccggtgggacggccgtcgtcgcactgacttccaattcaagctcttgaccccctactgtttgtttcaaagcggtgggtgtcccactggcaactaactggccatgatctatgagcgcaatgtggtcggctaactggtcagcttcctctaagtactgagtcgttagcaccacagtcgaaccatcggccactagttgacgaatcgcttgccacatctgcgctcttgtccgcggatccaagcccgtggtcggttcatcgagaaaaagaatggccggtttaccaatcaagctaaccgccaaatctaatcgtcgccgcattccgccagaaaatgtggtcaaaacgtgatccgcagactgcttcaaatcaaaatccgtcagtaattccatcgctcgatgcttcgccgccacacggcttaaaccattcaaacgcccaaaaatctgcaagttttcccgcgcactcaggtcctgatcgatactagcggtttgaccggtcaaaccaaactgctggcgaacgcgtcgggcttgcgacaatgaatcaaagccattgactaagattttcccagcatcttgtcgcaatagggtcgtcatcatcctgatgaccgtcgttttacccgcaccattaggacccaataagccaaaaatttcaccccgttggacttgcagtgacaagtcttgaacggcgactttcgttccaaatcgcttctgaacatgggtcatttgaatcatcatttcttcatccaagttaaaacctcccacaaattaatcaggtaccctgacaaaatatatattaaggccccctgactaaattgtcaacgattaattattgaccatcaatctaaaaatcaactaaccttaacgtaccgcataccaaagaatgttgtatacttaagaaaagaacgaatggaatgatcaatcgtgacaacgaatattaaggcggaactggtcgccggaaaattggccgagtacgaacaactaagtaaaatttatgatgacattgtcaagcaggcccgtccaagaataactgttgaaggtcagggcaagattctactagcactagccgatgaggaccacctctcacaaaaacagttggcaagtcgccttggcatgtcgccgcaatcaacgagcgagtttgtctataaacttgtcaatcgtcagctggtcactttatccaagtccaccaaagatcgccgcgtcaaccttgtgaacttaacggctgctggtcgcaaagagattgcatccgcagcccaggaggtccccccatttgtcaacacgctttctgacgacgagctcgatcaactggcacccttgttaaccaaaattaccaccgcgatgtatgcggatattgacgctgccaacccgactttgggcgttaagtttcacaaattatttgctagtcggtacttgaaacagtttaaaaagtaaatcatatgccacctgcccgtcatttttagatgacctcttgctccgaattaaccctgaatcagtatttggctctaaacaaacttaaaggcggaccaattcagttacgaattggttcgcctttagtgattatttaacttttaacaggaatcatagtttaccatttataatcaattgggtcctgtaagccccggccagtcgctttgtccaacataatgcgttgttcaaagtgcgccacatttcgtttagtctccttgaccatatccggattgactgaaacatagtcgatgccgctttgaatcaggaagttagtaaactctgggtactctgatggtgcttgaccacaaatcgaaaccgtcttgccatctttatgggctgtcttaatcaggtgccgaatcgctcgtttaacggccaagttccgctcatcaaagaggtgagccaccgtatcattattacgatcacaacccagaatcaacattgcaaggtcattcgaaccgatcgaatagccatcaacgaattgattgaattggtcggccaaaataatgttggttgggatttcagccatcatatagactttgaagtcagcactccgagctaggccttcatcgcgcataatggtcgttactttttgtgcttcgtcaacggttcgtacgaatggaatcatgacatttaaattcttcaacccaaattcgttccgaactttcttgaccgcagccagttccaacttgaaggcctcgatatacttggaatcatagtaccgagatgcaccccgccaacccagtaaatcagctggttcatgcggctcgtatttgtcgccaccctttagattacgatattcgctcgacttaaagtctgagaagcgtaggacgactggccgtggtgccattgcccgaacaaccttcgcgataccatccgccagcatattgaccaccttttcagggtgaccctgctcgatcaagtatagtggatgttcatgaataaaggttgtccataggaactcttcgcgcattaagccgattccatcagctggtaaacttgaatatttgtcagccaaatcaggatcacccaaattcatcatcacgcccgtagcagttggagcaaagctctcggccgcaaccacctgaccagcaaccgccgtagcaccactctttggcttcaacatgctagcgactttaccttgataaacaaccccgttcttagcatcgacggttacgacatcgccggtcttcaagacgtcggttgccgcgactttcttacttttagtgccgacaatacatggaatctgcatctcacgagaaacgatcgcagcgtgacaagtcatgccgccgttattagtcacgatcgctgcagctttcttcattgccggtacccaatctggtgatgtcattaacgtcactaacacttcgccttgcttgaactgatcaatgtctttcggattatcaatgacatgcacgaccccactggctaagcccggactagctggtaacccccggacgataactttagcatccgcctcatccacaacatcttcatcgtcagctgcatctttgtgcttattacgctgtgaccaaactgtttctggccgcgcttgaacgatccatagccggttggtattcgtgtccaaagcgtattccatgtccatataacaaccgtaatgccgttcgatttctttagcgtagccggccaattcaatgacttgcgcatctgttaatactggctgaccctgtaattcatcggggacggactcttccttagtcccgccacccggtaaccgcattaattggacaggttgtttgataatattcttttcaacgattttcattgattgtttatcgataacaaagtgatccggcgtaactttgcccaacacaatatattcacccaaaccataaatggcatcgatcacgatcttggaagcatccccatccgctacattgacggagaacatgatcccggaagccttagaaaagaccatcatttgaatcgccgctgagagggccactttttcgtgtggaaaatgctgtttgtgccgataatatgtcgcgcgatccgtgaacagtgacgagtaacattgttgaacccgattaacgacatcggcagcacctttaatatttaagtaagattcttgttggccggcaaatgaagcgtttggtaagtcttccgcagtcgctgaagagcgaatcgccacgaacggatcagtttgccccattttcttagcgagatccgcataggcttgttcaatatcagccgccagatctgcgggcattgtcgcattcacgatcaagttacgaatttgttcgcacgcagtatgcaattcatcagaattttcataatcctgaatgctggctaacaaatcattgaccttatcattcaatcccgtctgggtcatgaagtactgatacgcccgggcggtggtcgcaaagccatatgggactggaacatccatcgatgacgtcatttcacccagtgaagacgacttaccgcccactaggttcacatcttcgcggtgtaattcatcaaaccataaaacgtttgccgtatcacgactactcataagattacctccctatgttcctgcacttgaatatcatcattatcaaacttaagttctgtaagcgtttacattaaccatttatattgtagttcatttttacacaaagtaaaacccattttcattattttatcggcaaaatatagttggtgatgttgactggttacgcccgttaaagttcaacacaggcttgaaagaaaaggcatttaatggggacatgttttcaaatcaactcggattataatgataaactgtaaggccaactaattaacgaacttatttcacaatatacgaaatcaactcattgtggacgacgcaactcagtgtttatcaaaaaaacgcaaagtagccagcggtgattactttcatcaccgctggctactttaagcgtctagcactacaactatgacttaagtctaaatcgatatttcactaatccgcaagcgtttcaactggtagttgcatccctttccagccttccagtgctcctgccaattcgtatgcttcaaaacctgcggatagtagcacgagtaacgccgtcttgccaagggttgttccccccgtccaatcatacacgacataggtcttcgccggatccagttcaccgattctggttgccagatccttggcaggcatcgcgattgcacccttgatttgatctttcttcacttgggccggtgcattccgaacatctaagacgacgtacttgcccgtcgcattttgcatatcggctaaaacggtgtgatgatcgatgtataagcttaaatatgttgttaacaattcaattttcttgtcattcatgattaattgcctcactttttaattgttgggtgccttgcttgattttatccaataagcctttaaactgctgctgctcttgaaccgtaaacgacgcaaaaattgttgtaaccgccttaaaattggccggtaaaaattgcgtcaaaacactactaccggcggcggtcaaatgaatggcaaccgtccgcttatcatcttgtggatgctgcttttccacccagcctcgcttttgcaagccgaccagtaacttgctcacagtcgcccgagcagatcctagctttgtggctaactccgacggcaatagcgtgtgatcagtttcattttccagcaacattaaaataataaacttggattctgaaagttgatattgatcgagtaattgttcataggtggcttgcatggttcgaaatgtccactgaaaatccagaaaagccaacacctgctcagcatccgccgagctactcgctttgcccagcgtcaattgcacacgctgtttatctggtcgatcacgaaacgaaaagtcaggcattgaaatccttctttctaaaattgattagccggctaactacttttagaagtatacacgctttttcatcatcgtcaacccttaaatcggactagctgttattcgaaacactcaccatccaaataaccctagccatcaagcaccacgacatttttcgtttaaactgatgcagattgaaatcaatagattagcgtgcgcgactcaacagaaaataagcagtcagttgtgaaacctcccaacactcatgaaccctgcgcacaccaggtccagtacaattgacactcaccataatcgcatatgctatactgatgatcacgatacttattgatttggaggagtaccctaatgcacaaattagctattttggtgatgacaattggccttgcacttgctggttgtacgacccaaacattcgctccagtgaagcatcatcggtccgtcaaagcgacgacccaaaaagtgattcaagcaccaaccaaaacatggacttttgatcaagccgttagttccagccaaacaaaacacggcgtcgccagcaatttagacatttccgtggttgacaaaactactgcccaatcaagctggaccactagtaacggccaatttttgtccgccggcgtcaaacatcgtcaagtttcgtacgccaaatggcaccatgatcagcaacgccatatcatgaaaagttaccgacaccggctgcatcacatgtcagttagtcagatcaacgcggttttgaaaaagctcggtgcctcaatccagattaacaaactgactgacttaatttacttggaatccggcaatcacaccgatccgttaccagtcaacaccgcctttgctgctaaggggcaccacctttacgctgtcaacattcaatattcagatactgagcaggcaacgaccattgaacggggccgcgatttcactgatactagtgccaaggcggcgcctaaacacgtcaacgtagcgaatttgaatggtacctggatcgctgccgaaactacgactagcgctagcgatacaggcaagttgctgatcaaagatggctacctatatcagcatcgttatgatagttatgaacgatctgctatccaggacctcagtcactattcattaggctcactgaatcaaaacgtgacctatgcggccttcaaaaccgatgcagcccacgctggctatcaattaacacataccgccgttgccagtggtgatagtaccggtatgttatatctcatcatcaacgctaataaaatcatccgtatcaatcagcagattgttacgacctatacgaaaaccagtgccgttgtcgctgctaacgacctaccgaaaacagacgttgatttatttaagcaaatggatcaaaaaaaagctggtgaagtcgccacgacgattacggtaaaggccggtcccgcgcaagttggcatgaccaatagtattaactatctaaccgaccccaatgctggtcaaattacagagacaatcgtggtcaactaacaaccaaacaaccaggcgcttcatttgaaaaattatcaggtagtcacttatcaaaaacgctacttcataaagcgcgcagcaaaagccctgttgacctaattcccacatcaaaataagcacgttgtaaaaccacactctggtgatttttacaacgtgcttattttgtcatcgaacatctgcacagcatcaataattttatgattaacacagtaacgcaatttcacgacacctcaagccgattcagaaagtggtctggtcaacttacatccaagtatgacacgacaattgtcccgctttaatcatgaagaatacgactaattacgaggttagcccctaatcatgctcgtattcacgttttagtcgcatccatcctgcatgcagaccaaaagccgttgtaaaggacaataaccaggtcaaaccataacacagcgcaatgctcagccagggagccttgaccatcaaagtacgaccaaaaccgcgccacaacaattcagaccagaaaacattcgctaagtatgccttataggccataccagcaaagaaatgtacaaatttgctaaaaggacgttgacgacgaacttgaatctcacacaacgccgccaacaggccgatgactgctagcgcataccccgtcattgatggtttgtaatacggggcgttgcgcaaattaaccgggaagccgtaactgaacagttcccaattagtccagatcaggccaactaaccatagaccaagtaatcccggccaccacttgttaagcatgcgctgaaaggtatctcgaaacacccaagctaacatgccatagaacccgaaaatctggaaactgataaaaagccggtccagtaaataccaatcacggctgtgaggaccatggaaaacttgttggtcataaaaccacaaccaaagaacggcgaccagtgttgtaccgccaaatacgatccagccgcgtcgaggtcgagactgacaccaacggccaagcgcccagaataacggcattaatatgataaattgtagcatcatggtgttataccacagatgaggcgctgcattaccattaacgaactgccataaaaatccccgccagtcatgatattggctaccttgctgcaattgtggcatcaagattaagtagatcgcggtccaccaaatcgttggaataaacagcgcatgccattgctggtgcaaatagtcggtataggtcaacgcggtctgattaagcgtcaaacgcgtcgtcgtatagagaatgccaaaaataaaggccggtgccgtatacttgaccagattataaacaacaccaatcccagtttgcgtggcaatcgacggcccacttgccaatgcgtctgtgagaatcggctgggccatcaccgcagtacaggcccctagtttgaggtaatcgccaacgtcagtgacctccatcgacggactagaaatcatcgtcactgctaccacctcttcgaatttttaccagatcaaccgatggtcaaccttaaacccagtctaatagattcccatgggattacaagtacacttcgcgaacattaccagctaatgattgtattttttgatacgattccaactgctttacccttcaagcaaaccatacacttaaccatttagacaaaaaatcgcgtcagaccagtcagtattagccgatttacggtcagacacgatcgtgatttctttattatagattcctttacagatttcaatccggtgatctaggcccaacatgcaagtactaggctgagcagtagccaaccaccaaattactcagcgttttggtccaacaacacaatggcctttccaaaactgtctgccgcttgcaaataagcatgggccgccggtacctgattaaagttaaaaatccgagcaggggcgaccgacacatgatatgctgcgatgaagtcaaataaatcttgcaacaatgtctgagaaacatcgccagaggaaaagcccgttaaataacacccattcggaatatcactaatcgggtcaaaatcaggaacggtccacagcccacctaattcgcccgtcatatttacaatgccgccttcgttgagatgcgacaacgaatctttgacactgagtggaccaatcaagtcgataattttatcaaaatgagccgttgcggctggtaaacgagcgctatccggagcgacaatgacctcatcaaagccagcgtcaattaattgttgccgcttaactagccgccgagtagtcccggccacatggatcttcggattataagccttgatcagatttaaatcagcaatcccaaccccactagtagctgctcgaattagcacccggtccgtcgctttaagctgcaaagacttaaaaatgccataggccgtgtagtaggtctcaggggttgccaccaatgaggcaatcgatagattcgttttgatcggataaacctgctcgttcggtaataatacgtattcggcataactaccatcatatgcccgacccatctcacccatgattgaaaccacacgttgcccagacgtgaatgttgctggcgcactggtctcatcgaccacaccaactacttcgattccgagcactcgtgggaactgcacgctcggtgacttgccttcccgcgtaaagatttctgagtgattgataccaaaacctaaaacttttacccgggtccaccccggtttgacgttcggtttaggaagtgtcgttaattgtaacgcttctggtccacctggttggttcacgacgtatgcttgcaactttgctacctccgttcgtttttaatgccaatttaacgatagctgagattcacgcttttcgcaattaattaatcccctgcggaatatcagcattgcaatcatttagtcaatcgtcgccagaggtcgccggccaccgtcaaaccgataccagtcattaacactaatacgatcactattaaagttagccagccactaatagccggcactccccaatcactgctagttaatccgatggtcaacaaacagttcaagccgatggtcaccccaactgcgcgactaggccgtccccgccaaaatggaccactagtacgagtcatcaagattgttaacattgcactaaatatgagatagacgtaaagactagtgctcaactgaccggcagacaaccccaaaccatgcagccagactatcaaaccaacacccacagctgtccaaccagtcgctaggaaccccgcaattttgcttaagcggggcatatcccactgttcgggacgatggcgaatggttgtgcgatcagtgccaaggaccaatgttactaaatcattcagaatagccactaataccatcgcattcagcgacaatggcacgtaatctagccataaatagccgattgttaaaagcacggtcagttcgaccgtccgagtgagtttggtaattgtccaagtcagcatccgctggtagacgcgatgaccactgtctaaaatcgtcagaatatttgtcaaaccacccgttaacaggacgaacttagcacttcgtttggctaaatcagtggcattgtcaacggcaatcccaacctccgactgctttaatgctggcgcatcattaacaccgtcgcccgtcatccccaccacgtaacccgcgcgctgcatagctttgacaattgccaatttattctctggaacaacttcggcaatcccggcaacttgcgctaacggtcgcgagtgcgttttaaaggtctggtaggaaaccacttggccctttaatccaaccgcatcagccacagcctgtgctgtttttaaattatcgcctgtcagcataatcgttttaacgccccggtgttgaatcctttttaaggccgccgcactatctgggcgcggttgatcttgcaaaatcaacacaccttgtaaaacattattaatcatgaccgccactgaacggccccgggtcaaatccagttggtcgattgctaaagccggttgctgtgcggttaactcgtacaaacgactaagtgcaccaatacgtacccgcacaactgttggcgcttcaccaactagcgcttcggcataaccaacacttgcatcaaatggcttaaattcctgctgtggcagccgtttcaactgatagcgatgagcaaagttcacaattgcttgatccaccacgctaggatgtcgcgaatcggtcgcactagctgctaaccgcaacaattgctgatctgatctggccgacaaatttttaaactgcacgacttgcggctgatttgtcgttatcgttcccgttttgtcaacaagtaataaattcaaattggcagcttcctgaatacccgttaattcactgaccagaatccgcttccggctaagttcacgggcttctaccgaatttgcaactgcaaaacttgacggcatggcaatcggaatcgtcgcaatgaacagcatcgctagaaacggtaacatctgaatcatatctgcatggcgaattaacgctatcccaacaatgatgagtgctagagcactatctaacaatgccaaataaccaataattttacccaataatcgttgtaaatgaccaggcgcattgttttgattaatcaaactgactgtttttccagcccgactatgacttccagtcgccagtacgcgtgctaaagtttccccggctaccaccattgtacctgcaaaggccgtttcacccgacgtatggataactgcaacggattcaccggttattgagctttcatccgtataaattggattcgtcaacacacgaatatcagccgggattacactccctacctgtaaactaatcagatcacccacaactaaagccttcgcatcaatcaactgccaatgaccagcacgacgtaccgaactggttggcgtcaattgatgcgccagctcctgtaaaaccaaggccgcacgtcgcgattgaattgcaccattgacggctgcaaagaccagcattaacgcaataaagccagcctgaatttctttacccaaaacaacttcaataactaaggctccctccaaaatccatgccgatggttcccatagacgactgactacggccttaaaaaagttaaacgttggttctgggacatcattaaatccatctgccgctagtttagcggctgcttgttgctccgttaaatcttcaatcatgtctgcacctcgaatttgacaagcaccactggcaacctaactgtcgaatcaggtttatcacaaataattagtcaaacatcacgttatttgggaagtgtgccaaccgagcaccgtcagcacctaattcttcctcaatccgcaataattgattatatttttcaacgcgttcagagcgggctggcgcaccagcttttagctgagccgcattggtggccactgtgaaatcagcgacgaaagtatcaccagtttcgccagatcggtgtgacatcatcgtggcataaccatttttgcgagctagccgaatcgcggccaaagtttcggtaacggtcccgatttgatttaatttaattaaaatattgttagccatcccccgctgaattgcttgccgaattaattgcggattagtgcaaaccggatcgtcagccacaatctgaagctggtcaccatgagcagctgtaaagcttgcaaagttatcccagtcctcttccccgtatgggtcctcaattgaaacgatttctggaaatttcgctaataactgcagataataatcgccaagagctgccggcgtgtacgttttgccttcaaagtcataattgtgggtcgtttgattataaaaatacgaggccgccgcgtcaaaagcaatcgcaatttctttaccaggtgtataaccagctttaataatcgcatcatgtaatatttgcaaggcttcttctgagtttttaagatcaggcgcaaagccaccctcatcacctaaaccagtcgtgtacccggcatcttcgataacttttttcaaagtatgataagtattcacgatcttttcaaaaccgtcccgaaaactggttcgttcgaccggtgtaatcatgaattcttgaatatcaatgccattatctgcatgctccccaccattgatcacgttatgaaatgtttggggtagctctaaatcagtgccacctaagtaacgataaagcggctgctgtaatgcgtttgccgccgctcgtgccgttgccattgaaacacccaaaatagcattcgcacccagacgcgctttgttaggcgtaccatctaggtcaatcatgatttgatcaatatgggcttggttaaacgggtcagcaccatgtaaagcatgattaatgaccgtattaacattattaacagccttaagaacacctttgccggctaaacgatcaccaccatcgcgtaattcaactgcctctttttctccagtcgaagctcccgatggtacttccgcgcgtcctagcgtcccatctgacaaaataacgtcagcctcaactgttggattaccccgtgaatcaaaaatttcgcgagcctttaccgtttcaataacttgtttttccatatcaatctctccttcttaaccaaaaagaaaagacgcctactgtctgaaaaacaaacagtagacgtcatcaaattgattatcaattattatgtggcgaacgtcatcgccgattaacttttgaacaactaaagattacaccttctcaaaacaatgtcaatctttttataacatttttatcgttgaccagcttgacgcgtcttcattgccaatatcatggtccccaattcaatcagcactaaaatcagcaataaccccaacgccatggttgaccctaacgctgtccgatgcgcactagttccagtcgtctgtacttgaactaacgtgataacggcggacacgactgaagtcccaatggcccctgcaaactgctgcatggtattgaacacggcattgccatcagcttgatgctcagctgacaactgctgtaagccactcgtcatcgtattacccatggttaagccaataccaatcattaataaaatgtaaatggctaaaatcaaaccgcctgacaggtgcatccccaacaccgtaaacagtgccatggcaataaccaaaattgttgaacccgttaggactggtttggctgcacccagactgtctagaatacgtccacctagtggggcaaaaacagccccgattgccgcgccaggtagtacaaacaagccagctaacaaagcactcttgccgttcactaactggatgtagttgggcaatatgaaggccaacccgagggcacagatttgaaccaaaaagtacgccattaagtgcaaatcataagattttgtggtaaaaatcgccagattgattagctgttgtgccgctcgacgtgtgcggataacgaaccccacaagaccaatcagaccggctactagccaagccacaaaaatcagtggttgcgtggtaatcgtggctaatttgctaaatccaattgtaaagccaacgaataagaggacgatcatcagccaaccgaccacatcaaatccaactttaactgtcggctgggcttgccgaatcgcatatagccctaacacaagtgaaatcacgagtaccgggatcagcagcacgaaaacccaatgccaatccatccaactaacgatcaagcccccaaaagtcggccccagtgctggggcgattgcggtaatcagcgtgccaattcccatcaaggtccctttctgccgtgccggtgcccaatcaataataatattaaacatcaacggtaaagcaatcccagttcccagtccttgaatgattcgtccagtgactaaaacgggaaaactggtcgcggtcgcgtcaacgaccaatcccagtataaacaataaattggctgtcacaaacagcgttttagtgcgaaaacggcgtttcagaaacgccgaaattggtacaataattgcaactactaacaagtaagccgtggtcatccactggaccgtcgccgtattgagtgcaaattctcgcatcaacttagggaaagtgatattcatcgcagtctccacgatcactccgcaaaatgaaagtaatccggcagccacgattgcaagaatcaatttgaggtcaacacgtttttccatacttaaaatcagctccttaacctatagttcgaatacgaactaattaactattttagcacactatttcaaaattttaagtcctattttaattgactttttaacaattagttcttataattcactttagttagaatacgtaccataatatcattaaggagtcctcccatgcaagattcattaggaatcatgattaagaaagcgaacaatgcattagccagggactcagaccattatgcaaaatcactgggactaactggcatgcaaatcagtacgatcaactttattgccaacaatgaacagcatcacgacctcttccaacgggacttagaattagagttcaatattcgtaaagcaacctgttccagcctcgtttccaaaatggaagccgctgatttactcattcgcgtgccagcaaaggacgatggtcgctacaaacgactactcctaacacccaaggcccgccaattagccaccaagatcgaacgtttctttgaaaccagtgaacaacgaatggcgacaattttaggggtaaataccgccgaaacttacgaagccctgcgacaaattgccgttgctttttcaacaccgacccatgcacctgaaaattggtactaaccgttcaaagacccgctgacagtcactgactgccagcgggtctttgattttacgatcgatcaacaccgattactcggccaaaaaacgtgtaaacagctgttgataaattgcaataaagtcataaaacatctgttttggtaaactttcattgacctgatgttgggtcatattacccggtccataaaccgcaaagggaaaagcggctggttgacgcttagccaaattagaagcatcggtaattcccggacttgaggcaacgacaacatcgcggccagcataaggcttgccaatggcctgcactaactttactaaccgattatcagccgtggttgcaattggtgactcattcatgataacggtcatcttaatgtcagcaccttgctgattatatgccgcgatcaggtccgttaatttttgggtcacttggtcattatcgtattccggaatcgtccgcacattaacgagtgcagtcgctaaatcgggtaacgaatttacttggtccccaccgtttaacacgtcaatgttaaatctgaccggtcccatctcgcctgccggaatcgtttcaaagtagtcattggcttcattgagtaatttaatcagcgggactaaggcattatagccgcgttcgggtgtcgaactgtgtactgccttacccttagacgtcaattttaagtcataagaccccttctgctcagccgctgttccataaaccgttgaaggttcagcaatcagtaaaccagctgcatcttgcatcgccccttgttgataaaaggcagcagaaccagcttcaccaacttcttcgcccattgtcgccaacaagcgaatggtgccatgtttagggccaccttgctgctgaatattgatcatcgcaacgactaatgcgactaaaccagccttcatatccgtgacaccccgaccaaataactgaccggatttttctactaaggtgaaaggatcggtgtcccacgccgccaggtcacccgccgcaaccacatccatatgaccggaaactgctaaaacaggcttcccatgaccaatctcagcaactagatttgcacgatcaccggtaatggggtgaattttagctgaaatatcatacttcgccaacagggcttgcaaatattttgcgaccgtcaactcatggtcgttaactgatggaatcttaatcacatccgctagaatcttaagcgctgcatcgtcttcaatcgttcgcatattttgccaccaacttttttatcttttattttagtgtagcacgagacccagtcatttcaatcattaattggattaacgacactaaaaatagggattgttcaataagggttgccaaagcatttaggaactacatcacgaacacgcttgttgacactgatactaaaaaacgtggtgccatcagaaattggtttctaatagcaccacgtttaaatattaattaattatttcaggaataacctgttacagttatgttggattaacttacttcaagctcttgttgacccacttaataaagttggtttcattgttacccttgcgttctgcttcggtatggccctggccccaaaccgtcgcaaaatcaacacttttaacttgtgaattttgttttagcgtcaatgctaagttggtctcaacagtcaacgcagtatcactctgattgatacccgtccgaatccgccagtacttggctaccttgctcgtgttataaccgtcataataactggttagataatatagtgggttatataagttcatccgcttctgaatcgaacttccctgggcatccgtcttcttcaaatccgaccggtaagctttggcgtagcttgctttgtagttcttcaacttggcatacttcgactgattagtcgttaataacttgctgatagttgcgtcaaaatggttagcactactcccattcgtggcaaatagcttattttctgtttgttggcgcgtcaagccatcaaaagccccaacatcctttgaagccgtcttacaatgcttgacgaatgctttcacgctcgtaatcgttgccgtgtttttcttagcattatacgtgatccatttgccgttcttattgagcgccttaatataagcagtcgccgtcttataagtctcaccactcgtggacgaactgttagtcgccgtgccagatggcgcactgccagacggcttactcccgctcttagccgtaccgcttggcttcgacccactaggcattttaccactcgttaaagtttgtgacgctgcgccacttggtccttcgttgctagtggctttatatgggaaagtcgtgtccttcaaaaaattattcagtgattgctcaacttcttttttcagatatgtcgcataagtccccgaagtataaataccactcgtcgattttttgagcgtcaaggtcttgccgttggcatctttcaaccctaatttattgatatattgtgcataactcgtcgccatatcattcgacaaagctttggtccacgtaccttgtttacgagtaccagaattcgagtattgccccatattccattcataagcttcattggccgtatctaggctagtgattgggcaccaggccatcgcaccggccactgcatcactagtagatttacccgttgttgtcgctaacggggccccaattgctttcaagtaagtagtgtactttttgctgtcaccggtggcacccattaacgcactttgggcacccccaccactatggccaaacgtgaaaactcggttggtgttaccagcaatacggctacgattcaaacgcaaggtgcgcaccgcggccttcaaatcagtcacaccccatggcgacgaaccattggatttatctgactgactcaaaccacgacaaccagcggcaacgtatataaagccagccttagtatacttgttcgcactgctatcataacccgttggtgccgtttgcgcagcataaccaggtgtattcacgggcatcacgattggggcagttttagccgtgtaccccttaaccttagccttgttattgaacgtaatcgtgtaagtcttctgtccactagccttggcattcacgtactttgccggaataaagattcccattgattcatacgtactactcgttgttttagtaccatacttaacgccaacctgataatacactttattagtggcattgtagtgccattgcttttggttgatcaacagtttcttggcatttttcacatcagcctttgtgaccgtctgtttcgttgctttagcaactttcgccactgtgctcgttggatgtttagtcttcgtttcggagtgtccgcaagccgctaacccaacactcattactaacaaaccactcatcaggggcacaatttttctgaattgcatgataaaactcctctacaatatctgactttattagttggtgaacacgtttcactcccattgccgctaaaaaatcagtgcaaaagaacgacggatgatacggtagtcgtaatgaccacgttaccagctatcaataattagaattagtccctttactggtaaggttattttatcatcgccatcatagccccagcaacacatcacaccttaaactttcaaggtgtacaacgaaacggtcaagctgacattttcgcaaacaattcattcaaaatcctgcatgcttcggtctcaaaaagcgcttaacaccctatttcaacgcagtattattcataattaagtggcgtgttgcccgtgattgtcagggtttaatatttttttacgcccgtgtcaaaattgaggttcgccctgttgtctgatcattaaaatattcatactgaactagttcggcatacgacccagcaatgttgaccacattcgtatagccgcgctgaagtaacgcgcggaccatattgtaacttcgctgtccggtctgacaatgaatataaactggctgattggttggaatttccactaagcgctgtcgaaactgactcagtggaatattatgcgcgcccttgatgtgtccatcagcatactcttgtggttcacgggcatcgataataaacgctcccgccaagaccagctgtcgaacctgcgtcaccgcaacctgcttaaattcatcattcaggacgttttccgccactaagccaaccatgttgacgacatttttggcggtactgacccatggcgaataacataattcaacatctgtcaggtcactgactcgaccgtgcatcgtgattagactagcgataatatcaatcggtttgtcgacgtccgattgaccaatggcctgtgcgcccaaaatctcaccggtcggataactgaatatcaacttaagaaagacggctgttgtccctggcatcacgctgacccgattctgtggtgccaccgttgcgaaccgataatcaagttgctggtgctcacactcagtagcgttcaggcccgttgacgccacgtttaacgtaaagacgtgaagaacctgcgatccgatcacaccctgatactgtggcgtccgcccgtataaatgatccaccatgtgtcgggcctgcatttgtgcaggaaatgccaatgctagccgcgtagattgacgtgtaagccgattagtcacttcaatggcatcacccaccgcataaatgtcggccacggacgtctggtaacgatgatcaaccttgataccaccggtcacgcctaacgcacaacccgcttgaaccgctaattcagttactggtgtaaccccaattgccacaatcactaactggctggtcacggcgcgtcccgaggcgagctgcacttgtgttgcaccaatggccgtcacttgttcttgcagtatcacctgcacaccgtgatcgtatagttccttgtgtactagctgagcaaactcgtcatccaaagtgcccaagacgtgctcggcagcctcaatgattgtgatctgatagccagcctgttgtaaattttcagccatctctagtccgataaagccgccgccaacaatcgtcacatcatgaacgtgttgttcagtcagatacgcttgaatcgttcggacatcttgaacattgcggaccgttttaacattgggccggtcgattcccgcaatcactgcgggtagtatcggtcgagcaccaggtgaaagaatcagtgtatcatatgggacgatcgtcgttgctacctgtccttgccgtttgatcatcactgtcttagcctgcgcatcaatggcgacaaccgttgtattcacttgaacgtcaatattgtactgttgctcgaattgcatcggtgtctttaaaatcacgtcatcgggctggtcaatcacatcactgaatgtgtacggtaaggcacaattggaaaatgagacatccggccccttttcaaaaattgtaatctgggcgaactcgtccaatcgacgcacgcgggccgccgctgaagcaccaccaccaacgccaccaacaatgaccacttttttcactttcatctgaaccatcctttcgtaggtatgctgtagccctgccactaattagcttaattttaagggtttcaaggcgtaaccacaacatcaacgccgattaattcaaccgttttcattaattgacgtcattggctttctatttaagctaaaataagttagtatgtgtttaacacttaaaaaaacttaaggtgatcaattatgaaccaaaaaacacgcttagcattgattcttgatgaattaaaaacccacccatcactgagtttaaaagacattatgcaattaacggggacttcacgcgacactgcccggcgcgatattgtcaaactcgcagctcataatttggctgaacgaaactacggcggcattagtcggccgaatacgtttaataagctagatcagtacctggaccgggatgatgacttactgcaaactaaacgagccctggcccacactgccagttcgtatttactaaatgatgcgttattatttctagatatctcaaccaccgttgcctgtctaccacaatatctccagtccaagcaccccggcatgatcgttacgaattcccttgacattgctgaccaggcattacgacatagcaattttcaaacgcgtatcctgggtggcacattagatgcacaacaacggtgtgttcaaggcgctgacagcattctagcactacacaaatttcgatttacgaccacggtcttgagttgcgctgggttgaccgcagacggcgtttattacgcttacgaatctgatatcgctttaaaggaaacgttacgcgcccaaagcgaccggctagtgctgttgtttgaccacaccaaggtgaacgtcagccacaacttcaacttgctagctctcagtgattttgattactttgtgactgatcagccactaccggataacctagctactaaaattgcacctgataaacttatttacctttagaggaggatcattaacatgccatcttcactattaactactcaacgagcaatgttagccctgattcaaagcggattagcctacacgactgacccgttcgacaaagatcgctatcaaaagttacaaaccttattgattcaacaaatggccgccgctgccaacgtcgccactgctgacctgacggctgctctaactcaggactctggctacattacccccaaaatcgacgttcgcggcttgatacgccatggtaatcagctactactcgttcaagatattaaaacgaaactatgggccttaccaggcggctttgctgacgtgggctacacgccgactgaaaatgtgcaacgcgaggtgtgggaagagactggccgtcacgtcgcggttcaggggctcatcaccgtttttgatactgctctacgtgtcgatattccccaaccatttcagtattataaattggtctttgcttgtgaaattactgatggccaatttgagcctaacattgaggtcgcccaaacagcctactttacgctcgacaacttgccaccgttgtcccaaaaccggacaaccgaagaacagttggcacagctaatggcatcttccactaccatcacagtcgactaaatgactgctgaagcgccaaaaacatcccgactagcctgtctgctagccgggatgtttttgtttctttatgacgtctttcaatcaagttaggccgctattggcatcaacaattatgaaaaagagcgtcggattaacattaatttacatcaacctagtaattaccattttcacaatatggtggactttaagtcccctatcattacatatccaccaatccaactaaggtttgttgaaaattcagtcgccgaatatgccggggaatgaattggcgaatatcatcatcattaaagcctacttgcaatttattacgaccaacaataattggccgccgcaacaactggggttgttcgcataacagccggagcgtctcattgaatgacatatctggcagcttatcagcaattgcgggataactttgtgaacgggtagaaataatatcttccaatccattctcagttaggcacagaatttgttttaactcactaacagtaggggctgcgctactaaagttcttctcctcaaatgcaatatcatgatcccggaaccattggcgggcctttcgcgatgagttacatcctgcttgcgtaaacaatttaatcataattatttcgcctccttgattagtgtttttattatgataattataacttgtttattattgtagcaggttattcataactttgtaaagacctgaacgaagtaatcgtaaaaaattcattgttttttcatatttattattgtttaaataatataaatgttatacgaatcaccgttgattttcatgctgatcaaacgcgcgcagcaagcgtgacgccagcaaataagccacttcgtacttcaccgtcaactgccacaagaacggcccaagctgatcgtgtgccggggttaaattcgttagtaaattcaagtaacgttgcttctcggccagcgtacactgctttttaaaatagccccagacgtgctgataagccgttgtcaacgtggctttagttggcgtaatttgttcggcttctgctaataattgttggtagcgttcctgttttgcagctgaccaatcattgtgccgagctaattgtcggatggcattataatgctgctgtgagtgtgccatgacccagtacttttggtaagcccaatcttgttgccattgtgacattgctcccatctcctcaatcttttgatgaatttacaaatattgtaccgtctggctcagaaaaatagaaccaatttacattagtacactggtaacagtcgtaagttttgaaacttagcacaaaaatggcgatagcccagttacccgttggtgcaacttagctatcgccatcaaaacttatattttatgagtactactgttgtcaattaaagttgattagccagaactgatgttacttttcgcctggccaagctgagatcatgagctcacgttgcggataatcttgtggatgttccaacatatcggtgatcaatgtcgccaatgagaatagactaagtggcccaccgctaacagcatttccagctggttcaacaattaattgatccgcttcatcattgtacttgaaaaaatgacaggctagcaatgtatagtccaaatcactattcctgatgactgcggccccggccttttgccccgccacataggtcgtctcaacttcacgactaaacccaaactcgcggtgggctaaggtgtacattgcttctgaaatctgatcatagttgatttgaaactgggtcgtccaaaatagccgtttgaccccaactgcatccatcgcttgcaccaatgccgtggcaaactgcgccgcgtgggtaatgcccaccgttgagaatacgacgtcaatccctcgcagcgcgcgttttaaatcatcaacattgctcgcatccccgattaactgcgtggctaacgagacatcatgctcatgtcggtgatgatccaacaaagtcacgtggtgctgcggcatcacggccactcgacgatacacttcataccccaatttacccgttccaataatcaaaatattcattactgatcacgtcctcacatcactcgctaatttattcgtagcaacggccgaaccacaaatgacgccaacagcgcatatccacaccctatggttaatcagttcggtcgcttaaggctcattataccggttccaagatgataattcggtcattattcaaatttaattgtgattcgatgactgattagccttattttgaataacagggtcaatgacagccaccggtcagccatgagtacggacagctattaataactttgaaatagactaacgtcctaccattttagcttggccaggatgaccgaggccccaaagacaatttattatgcccgcagttggctatgaaaaaagcaccgctaagtttggggtaggaaccgatcctaaacttaacgatgcgactcaactctgttcgcgattgctgcgccaactaacgatcaattaccagtttaaccgcgagagctcatccatcattgctgaacgccgcggatattgttgctgccaatcatgtacaatcgcctgcacggtcgatttaccagccgggtaagcaagcatccgtttcaatatgccaaccaattgttgatactttcgccgagttccagtagtagtagccattttccgcacttcatgatcatatttcgctaatagcagatctgaaaaacgtggtttcaataacggctcatagatccgtaaatcccagagtccgtccgcggccacgaccgcttttaatagcgggttcaataagttttcttgcacgtacagtggtttcaaatcgacattggaattcttcgcgatcgctgtcaacagttgctcgcgaaccgccggccaatccgtggtcgggtaactctgcttcaactctgaaaatagcatctcatccgctggcgcatattcagtcagcaattgccataattcctgacgatacagttgttgttcacctaattgctgataagcgtcctttagttggcgactaagttccgctaacatgctgggatcgtccgtgaccaactttttaccatcctttagcaattggaccgcgtgcgcctcatcttgatgttgaagacagaactggctataaaacaagcgaacttgcggtatcgccaagttagcgccacaaaatttaataatttgcttatcaggcacatgagccgcagacatcatttgtaaatagtgctttagccatttttttatctgccagtcatagtcccagagatccgggtgtttttgcaccgcacggaaccgcttagcggtatacaccagctttgcatcaataaacgctggcgtcttgaaatatgtgaataataaatcgtcaagcgtatcttcaatgatattcaacgacttcgttaattgtttgcataaccaatcaaacacctgctgctgcacatccgcgtcggcttttgttaagacagcttcccacaagtcgtcactagcactcatgatcatcatgatctcaccatcggaatcatcaatgtcgacgtggtcgattttaagcatcagatgcgctaagatttgaaataccaaaccatactcgccgtgatcgaccaacggttgcacctcttcttttaggagagttaaggcctcatcaccgaagtccgtcgccgcgtcataatcgataaaaccaccgccatccgcgtttgtgtcaaataaatcatcaacactcgcgagatattcaggtaaatctgtcacaacattagtctcacccatgaccgtccggaacagctggacgagatgcttgtcatgggccaacaccacactcaaaaagtcccggacttgccgatcagtagcccgctccaccagcttagtggcagtctgttcaagactgtcgaaactagttggtgctttggaaacttgctgttgactggcaggtttatcagccgccgtcgcttggcacaaaacggccgccatgtgcttgcagtacggatgactattggcatacggacactcacacgcgccaccgtgaaagtcaccattagcgagatcaatcaccacgccatagtcctgcgtgcccgtaaccattgccgtaatttgtgttttggtccgttttaaatcagtgacatacccctgtaagtaataatcgtacccacgttcagcgattgccgttggaaaatagtcttcccagtccatattgtcactcccgttaactcgtttgtcctaaccatactgcggtatggcggattgggcaagacccggcaagcaatttctcaccatatcactcaataccgaccctcatttagcatacgctgtgtcataactttatctgttgacactaaaaagcttgttttttcaccgtggtttgtggctcattggccgcaccaatccagtgaattctcactgtttaactttccgaccgttgccagtgagacgccgtcttatcgaaattagttaaatcccggttttatcttttttacaggtgctataactaataacgccaaataagatgccttttctatctacgatggcccttacaatatgaagtttatactaataaagcaattgtaaaacatcgtacaatcatactttaggcgccaaattaatcccattaaaaaacgctataagatttcacaatcaggcttaatcactaaagcaaaataccactttaaatggacagaaatgtgactgacttatactacgcgccaaatatcaaattaagggtgtctgataattgatgaatttctttgcttgatgggaagtcatttgtttgtaagtaatatcttatcatccctaacatcatgccaccaataacatttatttccaaatctgactttggatgtgtgagagctgcctgtaaatgattacttaaaatatctttaagaccatccattagttgcatcttagcttgtggaattgccattattgcgtttattggtctgctccaacacatcagtaattgtctaagttccggttctaattgaccaactgcgttacttaagccaattccttgatttatgagtaatcgcttctttttcaatgtctcatcaagccacgttagaatatcttgtagtattgcgtctgtcagtgcaaatttgtcctcataatgtaaatagaaagttttacgactaatcatagatttgagtgcaatatccgtgacagtaacgttgtcaaatccattctctatgactaggtcaacaaatgatttggtgataacgtcgtcagtttttttcattctaaaatccgtcatatcgattcctccattaccagttttgccaattctgtaaccttatggctcatatggttgccatttgtagccttaagacacaaatcatattaatttgaccatgttttttatttcaatattaatataaactacccgtagcataaaaaaagggggtagtgaaaatgttcaacgtgtttaagagaaaaagcatctggatcagtatgttagtcgccactatattaatcggattatttgccttcgcacaagttggagctaggagcacagttaaggttcgtcatttaccattagcgttagtagtaaacgatacaggaaaagatgctaagaatgttgttaagaaattacgaaaagagagccataagaaaagcgctgaaattaaatgggtcaatgtaacccacacgagtgaactcactaaaggctttgcatccggaaaatactacggggctgttgtcattcattcgggatttactaaagctatcaatcagcaaacagactatttaaaaggtaaaatcataactcagaagctagctgcactggtagttaaaacgccagtggctgctaagacggcaccattccaacaacaaaaggccttagcaaattcattaaccaagaagaccccagaacaagcaaaaatctctttatacgtcagtcaaggaagtaatatgacggttgcaactattttgactactgcacttccaaagatgactgatcatctaaatcagaagatttctaacgaatatataaccgttgcaaataagtcaggactaacactatctcctcaggactggtctaaattgcaaacaccaattcacacaactcttatcaaacgcaataaagtttcaactaaagaaataagtggtatggcgccattcttagtaaccatcttctgttggctcggtagtcttattgctagtttactgaactggcgagaccatagtaagaatgagaagaaacgtactgatggccgcctctcattaactagtgtcacaagccaattaatttcgggtatcgcaattgtcactgcgattgctgtatcagtttacttcttcacaaaagtttgctattctgtgccaattcatgatccaaaacaattcctactgatgattggtggtatatcatttgttttctatctactgcagtcagctgtactcgatttgcttggactaaaaggatggccattactacttattatctggataggttcaatggcagtcattactttcattccgcaaatgctgagtcccttctatcataattatgtttatgatattacgccaattcgctttgcctatgatcttattcttaaccaaatgtatattacagatgcatcaatcactggaccttcaatgttgagcctgctgtacattggtatagcttcaatttttgccatgtatgcatctaccctcattaagaaacggaaaaaagacagcttagcataaaaagacgtacggcttctttaaacctcctgaacccagaaaagacgaatttaaaacatgaatagtggttaaatcaggttgtgtgtccagcatatccctgatttgccattatttaattcaataaatgataatttaggttttgatgaaagatgaaaggggataaaacaaatgccacaagaacaatatcaactaactgatgctaaattggtaaaacatctatttgatttaattgagactggacaaacactcgaaagtattactgtcacagaactttgcttaaagtcaggagtatctagaaaaactttttatcgtcattattcatccacacaaaaagtcattgagggctttttggataattctgcaaatgactttatcgaaatattgaaagaaacaccaatactttgtttaaatgattttatcgacgctcttttcaaattttggtttggcaacaaaaatcgattacaagttttacaaaattccgactttttctcatacacattacatcggttaactgcactcaaactgttggacattgtcaacttaacagaaaattctgattggcaacatctcacttcaacccagcaatccaatttttttaatttttgtgctggtggtttatggcatgtcttaaatactcaaagcatatctatttctgatcttgatacaagtttaattacatcactctttcaaccaaaaaattaatacaaaacaactattgtttattggtacaactaagtttgattctggaacagatttgattatctttcttaatttcacactctactaaaaagaatctacccaattttattaaattaaaaacgctaatcctgattacgtcgcctggatatataattttttaaacttcgcactttcaatcgatgtcaaaagtagaaaaagatatcaatatagtagtagatcataaatattcaaattcattatttaccctctttggtttaaacagttcggcatttaaaataatagagtagcgttcaaatcaagaagatgaacgctactctttttatgctagcccagcataagtgatgagttaattccaccgaatgctgccgacgtgctcaaggcaaatcagaccttcttatgtctgttgctcacgttaacacgcgaaatttgacagttttgtcaggtttgttgagccctatatttgtgggcaccagctaattcatgaccacttcaaccactcctgtaggctccaccatgtgtcctgtaaatttcttagtagaactggttaacggtattcttttaatacagccctaaaccaatttgacagttttgctgccagcaactgtagccatgcgcctcattctaaaatgacagtctataaattcaatcccctcaatttttccaattcacttctttaaataccatacccttcagtgtccatctgtgcccctttagtatggtctgaaaattttaacgggtcggcaaaagtcacccttctgtcaatttctttgaaagtattaggaacaacaatcattctttctcgttcaaaaggatccatgtaaaacgtgtatcgcacgtatcacacatcatggtattttcttttaatacagataccaaaacgtagctacctcatattgacctagaatatcttcccgcatgcactgtctgtaagcttttgcatagctacgtttatttgagaagttatgcttattcatctgcttaccttcttgcaagatatgaattattgactagaactgcacttgtactttttttaaaataacataaaacagataatatacgaactatttcagaatataaattaggataagtaattaaaggaaaaagcagaaaaaatttctacttttcaatatattgttcaatggccattattatttgttggttctgtggtaagtccgaatgttccgctccaacacccgaaacagttatttgcgtataatgcttaacttgcttttggtaaatatagcgacccgccaatacgctgtacaacggaactaagccgtcattgctataactttgagtgccagctaaagaatacatatcaattgagtttggaatatattttctgtttgcaatcaagttttctaacaactcagtctcacttctaacagaagaatcgttcaaattgtacggtgcagcaatagtcataaccttttgtacagttagataatggctagtcaaattatgttcaagtgcatacgtgataatcagcccaccattcgaatggccaattaatgaaatctttcgaaattcatattgttgtgatatatattttaaggcgtattttaaccagatagcttgtttctttatatttttaaaaccatctttattatcttcaaaagcaataacaataaagggttgtctttcacctttttttattgcaccactataggaaattgtataattcttatgcactaacactcttaacaaagaatgaggtgttttttcccttttattaatgtctcttataagcggatcaaatctatattgtgtcgcattacttcctggaaccaaaactatgggttcagtaactgagtttcgttgaatcttcaaatttgaaatattctgtttagtccatttatcggacaaaaaaattaacgtcataaggaagcataataggcctattgaaataataattttttttgagattcgcaagttaatcactccgtctattatcctctagactcacaaattcaaaatttatcttttaaaagaagatctaattttcgcatgctctagattaattagtctcatctctgctttaacaaacggtaaatatataaaacaagagacaactaagcaaagaagtgctaatagtagggtcggaatgttgcccccagtggcaataaaagctttcaacagtcctggcgtaccattaggcactggataaacaggcgctgggacaatattgtactttaaaaacggataagcaatgactgtcgttactaaaggactcattataaaaggaattagataaataggcatatacatgattggaaagccaaccatcactggctctgagaagttaaaaaacgtcggtatgaacgaccaagtcaataaccttttcaaatgttgattttttcctatgatgagcacgacaattatcaatgcgagtaacatgccatcgccacccaaatgggcaaaacaagaatataacgtcgagtaagcagttggatgaacagcagcaacaggatgtgcaaatttcaaagcacgatttaaatttaccaattgcgctcgggtactaaaactaaaaagaaaatccgcattaatccccataaatttactaatacttcttagaaaaagtattagtaacactggtatcaaactgtagtgattatcggttagggctgtttgaattatgctatgcagatgagtgtttattccatttgaatcaatttcaaaatttaatatttttaaaattaaaacacaaaaaatgatacagagaataggcttgatgtttgtcaatgtcgcaattaaagcgttttgataatcattatcgtccttattgacttcgactctaaaaaaatcaaaacatttactaactcctaggcccgtcagcaaagcaaaagtaacaccatgaattagaaaaatcaattcatggttctggcctaacttaatgctcaaaataataaaagagaatgcagccattgcaccacaagctatattattatctaaagatttgatcacatttcttgagaactggacagcaattattgtgttggcaaaaacttgtaatagctgaactaatacagtcagctgatttatcaaaacagcattacttgcaacaaagtgttctaagtgaaagataacgacaaaaaatccattgtcagtcattaaggcttgtaagatagtttcaagaaaaccattaacaacaattattggaaaagcagctattaatgcgtcttgcaaataattaaaccattttaaagtactgattctgtaaagccaatcaattatggactgaatattatatttcttcattgattgtttcaccatttaaatcatacaaaagtttcattttcccaagttagctcaatgtagcatatcactccatcaataccttacttttttattgactagaaatttctcaataccctttcaatagtatccactaaaagagtcaggcgcagctaaatctcaacaaaaaaacaccacatattatttaacttatacgtaataatactagttctgtcgacaatatatttcatactttaatagaatttattataaaatatcgaaatggaatattacacgattggctaccgcaaaatccctgaaaatggcacttattcaatacaagttagtttcttatctttgtttaattcaaaattaaacttgcaaaccagactcctcttaaagatacacgttaagattagatatacatgttgtttttaaatttctaagattttagtaaagtgcaaaaagatttagtttttaaaatttagacagtcataacgtgtcgtcacgttatttcgcccgcgcaattcgaatttgtacatggttacccatgcgctgaataatttgataatagttatgctcgtcaacataaccaatttcaccctgattaccggtgtgaccgtttgacaattcacgtgcaattgcttaaacagcactggaacgattcaaataagcaggccagttggtgccccttcattgtggtcgtaatccgccgtgcgactaggttattttgcaaattactatgattagaagatttaattctaactgactgcgatcgtctcaactgatttacgctttgaccacatactgataatcctaatacacccatcaatagattaaaaaacactaataacagggcgtaactttaaaaacactaaagtcatgccctgttattaattggccttatataacgatgcgacttatcacgccactctttttaatttgtttgttaccacgattattaattatcctgtttatttaactgcttcaaccaagtcgccgttgcaagtagacccacaactgctcgaccgaagtaaacacgatctgatcaccggcttcaacaattggctgattaggatcccacgccgccgtcaaacattgcaccccggccgtatcagctgcttcaaaatctgagcgagtatcgccaacgtacaagagttccgcggcgtctaacgacttagtgcgcatcaattgtcgcagattgtcagctttattaggttgacactcagaaccatacaaccgcgtggggaaataggacgtcaggccagtcacgtccaaggaaatttgacaactcttagccgccttacccgtaatcagagctagcgccatcccttgctgctgcaacagttctaaaagtgtgacgattcccggatacggtgctgacacccgtaaatgtgcgcgagcgtattcttgataaaaggcggccaaagcgaccggccaccgttgaccagccactgctttgaccatcccaacctcatttagcccaaacgtctggacgatagcttgcttggtcagttcgtgctcaacgtacggtgcaacgctacgacgaaagacgtcaatcaccattggaatcgtcggcgcgagcgtgccgtcaaagtcaaaggcgatcatcttaagcatgcggttcaccttgattaatctgccgaatcacacgacaaggattgcctaccgccaacgaattagctggaatgtctttgacgaccacactaccggcaccaatcacggatccccgaccaattgtcacgccgggaataataatcacgccaccgccaatccaacagccatcctcgattgtgactggccgcgctaacgtctggcaaaaatactgatcactatctggctgccagtccgcacgtaaacgttcatgcagttcgaccggatgggtagccgtataaatttgaacatttgaggcaatcaagacattattaccaatggtaatccgattacagtcgatcaaggtacagttcatattgattgaaacattctgaccaatcgaaatattacacccgtagtcacaaataaatgggctccccaccgaaacattcgatccaatcttggcaaacatagcctgcaatatcgtacgtttctcacttttttggtcataggcgagctggttatactggcttaaaagttgccgtgtacgccgttttagctctaaaaatactggtgcgtgtgcatcataggtctgaccgctcaaactccgctgtcgttcatccatcattaagcacccctttcacttccaagcttaaaaaacgaatcgttactattcaagtcacgattcgtttctttagttatagtcgtttcgctaaggtctcaatcacatagaccacggggacctgggtcgttatattataattaccattaattctctggtgagccaattgatatgaaaaattccaatcggaaagcttcgctagcgtggattgggactggttagtaatgcttaagactgcgcaccggcgttgttgaaaatgctgaacaagtacaattagttctggggtttcgccactctcagataacgcaaaaacgaccgtatcgtgaatctcaaaagtattcactggataattactatcctcaagtccaaacgcaaccttaccagcgttggtaaaacagcgcgcggcatagcgggccaaacttcctgaggaaccaatgccgacaaaaataaccagcgtggctcgacgcaaatacgtgagcgctggcatcaacttacgttcatacgcgctagaattagtttttgcaaaaaagtgtgctagctcactgacgtcgctcttgggctcgtaggtggtcaactgttgttgttcacttttaagtgcccgtttaaaatcacgatagccttcgaacccatttttaagacaaaaacgcaaaatcgtcgaggtcgacacgtgcaactcgtgagctaactcacgaatgctcatgtagccgaccctatccatattattaataacgtacctgtaaatttccacatcagtttcattatatttttcgagctgctcataactaaacatccgccactaccccccactccaataatccgttgcttggtcaccataatgacctggtttgttcgaccctcattagtcatacaatcgattggacgcgcaactactatcaatagcctactataatcagccactctgatcgcgctagcaaacgaccaacaccgttaccagtaatcagtctttatctatttaagcgcgaataccccgtcattacaagttggtagcaacctaaaaactaggctaatcactgacaaacgtcagctgactaccccagtttctttagcgtcaattttaaaaatgcgaactcgccagtgcctgtccatcaggctgccccactttaatgtgtgggccataaaaaatcaatcagtaaccggtcgacctgcgcattttcatgcaactggctgtgttgcgcatgtttcccagtaatcttaacctcgcgataagaacgcgcacgcgccgcaactaagtaccgtaaagagcgtgatgaagcgttactgacggacccatccgaatgcgtcccatcgcccttatcgccataaatattaaggactcgtacttgctgacgtggataaacccgccgcaatcctaataactggcggtaggccggtcgcaatttattcggtcgtcccgcagcattcaacgtcatctggttagggctgtcgtccatgcctaaaataccattgaaatgtccagcaattgcgacttgtcgcctgagctgcggcaaccgctcattttgcgcattcgccaatagataataggtaatcgccatattacccatggaatgaccaaccatgttaaacgacgtgatgccataagttcgttggagcgccaccaccacattttttgcccagcggcccacggttggataatctgaagaccggttattagcaaagttcacttcaacaattggtcgataatcacctgatctaaagtggcctttcaaagccaccgtcccgtttttagcaaccatcgcgcgtacaatagtttgtgttttgccggctttaacgatagcatctgccatgtgcgtctcagcatggtaactactgccccacccatggaaaaacagtgtcggaatgtagcgatgcccctgagtcgtaaccggtttagtcaccccggtcgtctctgcacgaccacaaccaactaataataacagcaggcctgccatcagcccccataagcgtattcttttcaataacttccccctgaattctatttaatcatctattcactgttagttcgtcatttgaatttgcgccaccccgcatcggaaggcgttgtcgtctgagcgttaacgcctattttagcattcaatcaaggctcatgacaggaattacaaccaactaggccggtcacccgccgtaccaggtttatcgacccctaaactgacacgctgataattttcaggatgcgccattaatttaaagactaaatcggcaacacttgctcgtgatacctcagttcctttaaaaggttctgcgccagtcgtcaattcataatcaatttcggcaacatccgttagccaggctggtcggatctccgtataaaccagttcggaagcactaagcaacctcgctgcttctcgaaaaccgggtaggaaatcggcaatggcttgttcgttccacgcgccaaattttcctggcacctcatgatgggcgccgagtgcactaatgaagatcaaccgttgccgctgagttcggaccattgcggccaaaatgctcttcgtctgggctgctagatcagtcccaccaacattggaatagactatgtccaccggtgccattgctgtggcaagttcatccgtatcaagcacgttgccatcaatcagcgtgacccgtggttgctcccgatactgggctaaacgttccgctcgacgtaggaacaataccagttcatcgtcagtttctgctaataaccgttgcgtcagcttcctggcaatcccaccattagcaccaataatcattattttagtcatttctattcacctttcttagatattcgtggcatcacttggaccgtcgcctgccgcggtccacttgctagcatcggcattaaatacggactaccggcatatttttgtcgataagcttggtcaatctggttatttaactgctcatcacaaatgggcacaaaattcaccagatgattgctctcggccaaatgaatccggccagccctttgggttacggccgatcgataccagcgtgagcgcggaccgttccaagcacggataaatagttgctgccctaccacgaccgaccaaatccaggtcggtgtcccgtatgtctgcccatcactgtaaaatggggagacttgaaaatcatccgccgtgctaaaagcggctaactgtgctctggaccactgcatcgtggttacagtggttgacactacgggctgattacttttgttcatcgttaacattcctccattctggcaaaatagtgatgcttaattcagagcacttcggttaaatggtgccctgccttgatgcttgacacgttattctctgaataaccaactattctgcactaacctcaagtttcatcttaaagcttgacagcaaccatgtcgaatgcttatatggtatttaaaattatacttaattgtaatagaaagaagtgctttagatggaattacgagttctacgttattttcaagcagtggtcgccgagttaaatatcagtcgggccgctgaacgcttacacgtctcgcagccaacaatttcacgacaattaaaggatttagaggatgaactgggcgtgaccctatttgaacgcaatggccgtcatatcagtctcacgagtagtggcgaatactttgccacgcaggcgaaccaaatcatcgccttagccgataagacgcttgccaacattaatacagccaaagaaatcagtggcacgattgaattagggagtgccgagatgcgcagttttttgacgattgctcagtcgattaagaaactacaacaacagtatccgaaaatcaggatcaacgtgacgagtagtaatgcgaatcagattcgaaccaacctcaaaaccgggaactttgactttggaatcgtcacggaaccaactgacaaacacgacttaaactttatccatctacccggcgaaagtcgctggggattactggttccgcggcattcgccgctagctgaccatgattacattagcttagctgatcttgaaggccaaaagatcattgtttctgcacaacacggtacgatcaatcaacttcaggattggtatggtgaaagcacgccaaaattcaccatcgtcgccacttataatttactctataatgcctcgttactagtttctgcgggcgtcgggtacgcgttggggattgatggcatcatcaatacgaaccaatccgatttaattttcatcccactaacacctcgaataaccgcccgcactagcctagtctggactaagggacaacgcttgtcggaagccgccaaaacctttttaacgcaactggcgacagacctgcagcaacaaatacctactgactgacactatcgactcagctttcaccaatcaccacaacacactgcccaattgatggctgctgaaaacgacgcgcatctaattcacgctagtccgaactaaataattgaattgagcacaactaaaatgctaagctaggttattcagtttcagggaggaattatttaaaatgaaagcagtcattattaatcagtacggtgggcccgaagaactccagatggccactatcgaacgtcccagcattgatcaggacgaggtcttagtcgccgttcaggcaacgagtatcaaccccatcgattggaaagctcgtcaagggttgcttaaaggcatgtttgactggcaaatgccagttgtccttggttgggacgtcgctgggaccattgttgaggctggcgcggccgtgaccaactttaaggttggtgatgaagtctttgcccgcccagacatttatgcggatggccggcgcgggacctacgctgaatatgccgcagtcaaagaagacaagttagcactaaaaccagccagtctttcttttgaacaagccgccgctttgccgttagcggggctaactgcttaccaagtcattcatgaccaattaaagattcaagctggcgagaaagtcttaattcaagccggtgctggcggggttggtttaaatgccatccagattgctaagtacctcggtgccgaggttgcgactactgcgagcgccaatcaccatacgctgttgaagcaaatcggcgctgaccacgtcattgattaccacacgacggctgttcaagatgtccttacagactacgatgccgtctttgataccattgacgccattgatgagggcttggcaatcttaaagccaactggccgactcgtgacgattgatgggcaaccaacagcggctcaaaaatcccaaggccccactgtctccagctggtggttacaacccaacggccgggagttagccatcttggggcagctcgccgttgaaggacacttacaagtcatcatcgaccaagtctttccgtttagtacggctggtctccaagccgcccaccggtatagcgaaaacagtcacagtgctggtaagctcatcatcaacgtcggcactgaagcttaatacggtatcggctccagcctcagccaattgaccaatcgccacattgactgtcaaacgacgcattaaagccttaaaagggcgcttcaagaatccactacgaattcttgaagcgcccttttttaagccccatcgcccgaataacgctagttgtcacccctgcattttcagccgcttgtcccatctgtgcctcggcgtgatacctattaccgccaccgtggaaaaataacgtaggcgtatttgactgtacatacttcatgcggtgttgttgtgccatacatccactgagccccagtactagcaaaaccactagcaaccccgacagccatttcacttttacttgcatgtcctgattcctacttttgactggaatctattatacagggttcctgtcagcgcaaatcaggctttttcaccaattatgggatgacgaacagtgctttcatcatttggatggcataaaaacagacttgggaaatgaccccaagtctgtgatttaatgcgcctgtgctgctttacgttaggtcaatgcttatcactactattcgaccagttaccacgagctgtaattcgtggtgtttgattgcctcgctgatattcttgtttgacggctagttgccccaccaaatttaaatagttaaacggttgattaaaattcggctgaaagaacatatccacgtaagccaaatcatcaatcgtattctgattttgaatcattactgagatcgtgtttgcagcttgggcaatgtcgtgacgactccagaattgcgcgccgagaagctgacgattctgataattataaactagttcaatcgtgactttggccgtcgtcggcatataagctggccgccaattgccttgatagacggcgtgtcgtactggtagttctcgtctttgcgcggctagataggtcaacccagttgtggccatcgtgtgatcaaataattgcatggctgaggtggcttgcgttcccatgtacggctgtaaatctccgaaaacattgatccccgccaacgcaccttggcgcagtgcgttagttgccaatggtgtatacgccggctgtcccgtgggattgtaattgaccacgcaagcatccccagccgcataaatatccgggtcagaggtttgaacataatcattgatcaagatagcaccatggcggtccatagcgacctgcccgcgtaacaattccgtattcggcataaagcccgcgcaaacgacggccagatcaacctcataatcaccctgcgcagtttcaacgatcaactgatcattcgaaccgcttgcgaatccagtcacccgttcattgaggtggatatcgacctggtgatgttgtaagagtttagttgcagcatccgccatttggggaccaagataattattcaaaatatgtgaatgcgaatgaaataacatgacttgttggttcatactagcatagctttccgctaactcggtccccatatatccggccccaacaattgcaacgcgttggttggcttgtagagattgataaagttgttccgcctgctcgtagtttttgcacagtaatactttctcatgatcgatacccataattggtggcacaataactgatgaaccagttgccataatcagcttatcataagtatcatcaaagacttcgccagtctgcatattggcgacctgcaccgttttatggcccgtatcaattcgtaaaacattatggcgggtcttaacttgagcgcctaactgcttcaagtcagccggcgaggtgtaaaacatgtcttccaggtgttggatgacacccgttaagtacaaataaatcccactcgaaacaaacgaaacgttatcattccgctcgtaaatcgtcaccgccgtctccggatgacgtgttaaaatttcgcgtgccgctgccgtaccagcgtgggtactaccgatgatcattactttcatcttaccggatcttccattcttccagatttgccacgtaattagtaagtgggctcaacattaaccactattcaattaattatatcgcgcaccaaattatttgtatatgtgttgataaaaataaacctagttggcccctcgttcaaacagcctagctttacaaccactgattagctttcgccacacgaatcgcttctaatcgattgtgaacccccaatttgctaaaaatggcggataagtaattacgggtcgtccccgctgacaagtataaattggccgcaatcgtcttcgtgggcaaccccttctcagcttcgaccaaaactgctagttcccgttcggtcaatggattgttgtctgctgacaacatattcgtgactagctcgggcgcatagatggtgcggccggtcatcacagctcgaattgcatcaattaggtcatcactcggactatcttttaacaaatatcccgcgacattggctttaactgctcgttcaaaataacggcgttgcgcaaaagtcgtcaaaacaattactttcgtggctagctgcgaactggccaatcgatcagcaacatccaagccggttatccctggcatttcgatatccagaattgcgacatccggttgcagttcttgcaactcctgccaggcgtttatgccgtctactgcgctacccaccacgtgtagatcatcttctaattccagtaattgggtcaaggcagaattcaacatgctttggtcttctgctaagtataaagttatcatgctgactcactactcctttggtaaagttaagatcaactgggtgccgcgccgactactcgtgatggcaaaggtgccctgtttagcttgcaagcgggttcgcatcccggcaatcccgttggcgccctgacgaatcaaggttccacctttaccgtcatctttcagcttaatctgataaatttttgccgtctcgacaaaatcaatccgcacctcgtgcgcgtgtgcgtggcgcatcacattggtcatggcttcaactaacaccgccgcaaaacaactttggaccgttgtcggccacttggttgcctgtgtctcaccagtggtcgtcgtccagacaccaaccactgctagattacgagtttgggccaataggacttctgtgagcgattgttcatgcaaattattgacgatttcgcgaactaactgtaaattttggcgactggtttgttcgatttcgtccaattctggtgccactttctccggtgctttgacgagtaattttttagctaattccgttttgagtgtaatcattgaaaagctttgtccaagggtatcgtgcaagtcacgcgcgattcgttcacgctcgttacgttccacaattgtttttaatcggcggttagtttggttgagttggcgctgtcgttcaactgaccacgaaaaggtatacgcgagtatgggtgataacaatggaaaaactaagcccatcacgtcaccattatgccacccaaacacaccaggatattgtaaatagtctcgtatacagccaccaattaaaaaggcataataccctaaagcaaaaccataaaattctcgtttaggacgacgaccaagtaaaaagctcacttgccagccgggaaagatgatcataaaattgttagccgcaaataccgcaaacagtcccgtcacaactaactccgctggcatcgtcactgcacgccaatgtggcttctcgacaaccaagatgtacaacacaagaaaaccaccaacaagcaatagccaaagccaatcatgctaagatttaacgggtatgtaagccgcaattgtatacggcaaataggcgagccacacgtagctcgtccattcaatcgtcttcaatttatttttatgatgcgtcaacaacgccattcccccgtttaagtccccgctgaatcacccaactaacaatcactaataggccgcacacccacagcccgataccaagcaaatcgattaattttagtgtaccatgggtgccccagttgaccaacaaatcgttcacataatatgttggcagtcgtttaccaatcacctgtagccagcttggtaataggctaatgggccaccatagaccactaataatggccattggaaaggtaattaaattactagcgacactcaacgtttcggcacgattcaaaaatgagagtccaacgcccataagcaatgtcggtaattgaccaatcagagcaattccaagtatccctagccattgaaccacggttaaatcaacgtggttcacaacgaccgcaatcgcgcctaaaataacgaccgttaacgcattcattcccaaactcatcatgccaatcgaacgatagtacggtactaccccgtgtggcgttaaccgtagccaccgtaatagtccccgttcccgatcatgcattagaatctgggcaatactgaacagcgtactgatcgtcccactataaacgatcatactgcccatataagaccgattaaaaagtgcgatttgagccgttgtgccaccggtaaccattacttttgtaaataacaagtaaaaagctgctggcatcaccaaggcaaaaaactgaaacgctgcgtttcgaataatcaaacgccgtgcatcaaatctcagttgagccattaaaattttcatgctgagactcccttcgtcagatgaacaaaaatatccgtcaatgattcacgactaattgagacttgatgcaactcactgattatgggcatcatcgcttgcagcgtagcgtcaccgtcttcactactcatgcgtagttcgtcgccttgcttagtaaccgcagttactgccgttaaatttgtaaaccgatccgctggcagtctcgtttggcaacgaatctccacttgttgatattgtttttgcaacacggcaaacgagccttgaaagacaaagcgcccgtccttcagcaacataattcgatcagcgatggcttcaatctccggtaggtaatgactggtaatgataatggttttaccagcggccttcaagcgcctaatctgttgccaaaatgtctgttgcgcattggtatccatgccaacggtcggctcgtctaaaaataacaaatcgggatcacctaccagtgccaaagcaaaggtgactcgtcgtaactgtcctccagataacgccgtcaagcgttgctgggctatgtcttgtagtttcaaggtggctaataatgcttgccaatcaaattcaggcagacgttgagccgcagctagccttaacatatcacgcaccgtcacgccttgaattgccatatcaccctgcatcattgacccaatctttaatcgcgccgccaggctaccggccgcttgcccgaacaccttgagatggccctgctgaactcgtttgattcctaataacaaatttaacaacgtcgttttgccggccccattttcaccaatcaagccaacaatctcgcccggcatgatcgtcatattaatatcagtcaaaactgactgttgaccataactaaatgcgaccttagttgcttcaatcaacggtgtcattatccccgcctcctttaatgactatagtgtacgccagcgtaatcgggtcgagtagtcgcgtttgtcataatgatcaggtgacaaatgtcattatttcaacagtattgataagttagcataattctttagaaaataacccagacaaaaagtgagcttctggatttacatcaaaagctcatttgaatcacaattaataacgctagttaccgtgctttcaatacccaatgtgccaattgcgaaacgataacgattccaataacaccaatgatacgcaaactcaatggcagtgttcgaccataaatgagccaggcagctaacaccagtaattcaccgccaaaaattacaaatttcattccaacacatccaatccacttttcgctagtatacgagccagccaatacaatgtcgattgatctgccattcctaactgagggtggtcgctgattaactgtgatttcacttcgtttagttgttactcgcctacgtatgtatgtctttaatccgccattctccagttggaaaatgattagtccatcaaaagttcaatacattcaaaggtcattccaaccgttaaattagttttggcactgacaccggctcttatgttaaacttaatcaatcacaacgaaaataaggaggtcgaccattgttaattaagtctttcccgcctgccgagcgaacaccgcaattgattagccaattaactcaactctggcgacagtccgtcgacgccagtcaccactttctaacgcccgctgaaatcacaaccattgagcacgaagtccccacagcattacgaaccgttccacaactgctcgttgcagtggatgatcaaaataccccaactggtttcatcggtattgatggttcactagtagccatgctttttatcgccccagccgctagtggcgctggtattggaaccgccttactgcaaactagtattcaggattatggtgccacaacgcttacagtgaatgaacaaaacccacgggcgcgtcaattttatgaacaccgtggtttccaagtcactaatcgccaaccaactgatgatcagggccgtccatatccactattaactatgacttacaactgtgacccattaaacgactgacttgacaaggtcgttttttttataaataatggacttgtccactatttataaaaaaaggagtgctgactatcgagtattttagtctaactaaatatattgcgggtatttaccgcgaatccaaaaacagcatcaacacccaactacaggcgctgaacattcgggcgaccgaaagtgacttattactggttgtttacgatcacccggcccaaactcaaaaggacttggctgccagtctgatgctcgatcctagtttattagctcgaactgttcgtcaacttgagcaacgccaactcgtcatccggtttcgtgatcctgccgatcagcgtagtctacgaattagcttgacaccggctggtgaacaaatcgctatcgccattaagaaaacattgattgactggtggcatgacttcttcgctgctcatccagaagtcaacgagcaagtgtttacgcaccaattacaacaagtttacctcgccttacaagagaaaagagattgaaatcgtcattgaaaaaattcattaaacactttggagtcctcgtaattggtatcctgtgcatgtcagctggcgtcgcactctctaaattatccttattaggaacgtccccaatctcaagtattccgaatgtcattagcaatattacggcaattccaattggccagttgacaattgcttttattttcattttagttctactagaagccatcgttttgcgccggcagttctcctggcaaaacttattgcaattaattccgggtagcctgttcggttggttcatcgatgcttttgtgcggtttttccatagtcttcctaatcaaacatacatcgagcaactcggacttgtcttaatgggaacggtgctcttatcgttaggtgtctttttagaagtcaattcacacgccattatcatgcctggtgaaggacttccgaacgccatcgcactgatgcatcaactcaagtttgccaaagtcaaagtttataatgatttcattctgattggcatttcactagtcctggcactcagctttactcattctttagcgggggttcgggaaggtaccctcattgcagcctttttaactgggcgactcgtaaatttctttaccgaacatgcaaatcgatttgttgcttggatgacaccagccgctgacgcgaacaactaatttccagaattatcaaataaaaacacggtcactggctagtgatcgtgttttttggcttgtgttcacgccaattcgttagtctgccagtgcccgaattctttcagccactaatgcaggtgaacatcggctatccgttaattattctcctaattgatttactttggacccacatgctcgttattacatgttgtagtaattgtcgatcattttcatcgctaccaaacgccacttagcgctggatccccagtcgttacaggcggaccatttattgaccctaatagcaatcaaatcaagattaccttctgtggtatgctgaacagtcatcaacatctcagttgccagcaattaagtacttaagcgcatactctgcatcttcatcaaccctcaataagataactttaatcacttcatccaatttcggcagtccaactctttgtggcaagtgtcgagaatcaagctggttgaaaatcgacttgagccgcacaatctcagcagccatccgcaatataactcaatcgctagcaaccatctcagtcacgagctgtaaatcatgcgaccgtattgatgcaactggtttgatttgccgattatctgcaattaacgccccattggcaccaatcagtagtccgtcctcaaagcccggaatcattggtatcaaatctcgaagcggttcaaaactgattgattttattttgatgctgtcaaaaaacactcacttaactaaaattagctaagtgagtgtctcgtcaactaatggccacgatgttgagcacgatgttttgccaaccgctttgctcgtatcaactgagcatggtcatgtcgggcacgacgctgctgccgcttcttcattaccaagttacgctgatgttctaacttcaacatttgcattgctctagtcggtttgaatcgaacgtgatgttgacgacattgtcgtgccgcacgacgatactcgcgaaccaattgctgctgagcaaccgcactagccgtcgtccattgcagcgttgaccaccgatcttgaattaacaacctaatctggggttcactaggattctgcgtcccaaaggtcactcgggcgacttgatacccgtccgtcgaccaacgctcaaaaacaccctgataaaattgttgatcaaaaaacaccgttaatttgcatcggttaatcaaattaacccctccttaatttcactaacgaaattcggacaaccaaggaaggcaggttactgacagccgttgctgcgtctggactaccgaccagaccgtgtttttaatttcgctaataattagtatgtcagattaagtcagtttgtcaaattagcacttatgtatcaatggaataattaatgcacttagttaatccgacatgaatcatgattaaaacgtgacagtcaatcagactcctgctcgtcagcttgggctactgagcactgtcaccctgccgctcccatcggtcaaccactcgaatggctgataattatgcctccagttagcgtggtaagaatccaccgaaaattggtgcaaactcaaactgtttccggttgatccaagctggcagttgctgaattttaaaatcaagacgttttaaccatagttattgctaaataataacgagtacaacaagtaataattaagattatattaaatagtgtaataccacactattactctatgattaatagtatactttgtttgtaaaataccttgaagtggttattattagccgcttaaggtttagggggattccaatatgaacacaccactactgaccgtcacgcaattaaatcaatacttcagtcaccagcacattttaaaagccctgaccttcaccattcaaaaggggcatatcgtcgccttagttggtgcaaatggtgctggcaaaacgacactgatgaaatcaatcttagggctcacttcctttactggtcagatttatttaaatggtcagtcaattacgccatgccatcaccaagctttaagcgctgtgggcgccctaattgaatatcccggactctacccattcttgactggccggcaacaactctcactgttcgcaaccggtgccaatcgtacagcacgcgttaccaaaatcattgaagcacttagcatgcaagcatttgccgatatactaacgaaacactactcactcggtatgcggcaaaaattgggtgtagccttggctttgctcaatcagcccgcactagtcatcttagatgaacccatgaatggtcttgatccacaggccacaaaagaattacgcgatttaattttatgggcgcaagctcaaggcaccacctttttaatttcaagtcatctcctgagtgaactgcaacgggtcgccaatgacgtcttagttcttgatcacgggcaactgatcgccaatatgagcatgccagcgtttcttgcccaacagcgccccacttatgaattagtaactaatcaagatcaacgggcttatcagctattgcgttctgctggataccacctagttgcagcaacaccaattcgtgtcttaataacgcccggatttcagcttaatccattactgcaactacttttgaccaatcagattcagttacagcggattcaaccccacactgaagacttagaatcatccttattaaccatgctgaaaacggtcaaccactaaggaggtcaatctaatgttcacattgttacgacaagaaaatcgaaaattaatgcactatcgtgtgattcaactgtttattccatttataatgatttttcaattcataattgcgatatatgccgctcactacccacagctactaacgccatatgatgcatttgtaaacaacgactacggctttattccgatactatttttgacaatcacaattggcagcacttatttaacgaatgaacggcaaaatggcacgttacgagcgctactttatcgcagttattcgcggacccaagtcttagtcagcaaatggctcacgatactcggtctgatgattggcttatctggctttagcaccctcatgagtctcggactgaagttgagcttttttcggcgcttacctaattacggtacaatttggcacacttggggtctgaacatgctatcaacaggactgaccctactatttttaatgagtgtcgtcttactattgggcaccctattcaccagttcaacaccagccattctgaccggcatcattgggtactttattgtgaccattttcaatcaactttgtttttatttatacgccaaagtcagctggttaaagtggaatccgctcaacatgatcaatctaggcgagcaaatccaaacaccacagctacaacaattaacccgactaaatctatccacgctgacgattggttatatcgcctatctactgttattcttaacacttgccaactattcttttcaaactcgtaacgtttaaaagcatccagtcggtcaaataagattactaaccagctggatgctttatcgattaattgttaatttcatcatattagcgtaactggcgcacaacttgccaaaaataacaactccagcgtggttgataaatccaagcaatcagaccaattaatgttgctgaccaaactactgctacatatgaccaactcgtctgtggtgccagcataacgtcggtaatcaatttagtcagtatgatgctcaaccctatcagcattggtacccgccaagccggtaacaaaatcgcttggtggttacgttccgtgatttgctgggcgctcaaataccgaccaagtatcccgcccaagccccagactagacatccaattgcgatacccaacaaccagtgttgattgaggaacgccaacaaataattaccaggttggccgaatgaccgtatcaatacaaaccaactgattggtttaacgattgcatagccgacgagcattgccattaccaggttaggcgtgaccaataacactaatgcagaagcggtcatcaaaatcagtgcaacgagcgtggtactgattacattgccgccccagacccaccaattgaattgcgcgaaataaattccgggaatattctgtaccagcaccagcagaaccattaatttcgccaaactatacgcaatgatcgtcgttaaactatagctcaaaaacgtcgcaccaaaaatagctgctcggcgaaatcctaagctctgtaaccactcattctgatgccggtaacgtggaatggcaatgagtgctatgcccactaaaatactgattccccatagaaaatcatttggttcaacattactcccaacgcgcaaattcgccaataatccccgccgatcagcatgataaacttgtaaatattgattcaagtactgctgtttcgaaggtgctactaagccatctacatcctgatactgttgccgccggtggtcgtatttaagacctgaaattagcatgtcatgattctgatctagcatttgccagtgttgattcattctgaagccagtccacgcccccagtgctataaacaaaatcagcataccaatgagaagtggcgcatgctgccaaataatcaagtgccccaattttttattcatctcacaacttcccccagttgatggtaacgacggccagcacgatagacgagcattgccatcatagtcagcacgattccgaccaattcataccacggcgcaattgttcccatcaaaggcagtagtaggatgtccccaagtgttgagccaatactcaaactaatcaaagcactggcgataaccccattaaatagcgattgttgccgcaatgtggtgatatccgctgaccattgacgacaggccatccaagttaatcctagtagcatcagcaagcccactaatgccatgattgccgctaccccgtagtgaacatgtaaccagatactaggcaacgactgaatgtgaaaccaccgcaaccacatatttgtccgcgttaacattcccgacgcccaacgccaggtcagagtgctgatcaggattgctaaccataaccgctgattaaagctccccaccagccaagcaagcataattaggcacccactgaccatcgtcactgccacactacttcccaagagggcggccccgttacggtattgctgataaacttgggggattgcagccgtgatccagccataataaatcacttgacttacaaaaacggtgaccattaatagcagcccgagccgcagctgttgccaccaaatttgccaacgcgtaacacctaaactagccataaactcgaagcggtgtgtgcgacgaccccagaatgcaagcagcaaaccgctgacgagtcccaaaacataatacaaacggttgggttgttgggcccgcactgcctgattgggatccgtagaagtgtattcgccaggccaaaaaaactggtcaagatgttcataataaacatgcaggctaaccgccggacgaccggcaactttatagtctttcgggtgtttaacaaaatccgcagcgttgatccgttcaccacgtacactccgggcatgttccacctgccaagtatgtgtcacattaattgccattaataagctcactaacagacacgttgccgtcacaagtcgcacccaaggccgattttgttgccaccataaccgtctcaattttacagttgccattctacacaccaccccaaacagcttgccggtcgcccaatttaactcggaaaacatctgtaatggtcaacggctggacggccatcatcaatggttgattttgttggagcgctgtctcaattgtcggcgtgtagtccgcaaagtacacttctaagacccgaccgtaaactttaatcagctgcccatgctctttcacaaccgctggtatatgcttatctgcaaaaacaagctgaaacttgcgggccgttgcccgtaaactttctaggtcgtaatcagcaactaattcatgatgttgcaaaaacagcacttggtcgcataaaccgtcaagttcatcaagattatgtgatgaaatcaagaaactgacgccgtgttcggcgacctcctcaaccatataggctacaatccgctcgcgcacgatgatatccaaaccatcaaacggctcatccaaaataatatatggcacgtgactcgctaacgctagcaagatttgaaataacatctgctgaccctttgataaccgctggtagtagcttttggttgataaatgctcggccgctaataacgctgttagttgcgattggtcaaagtcatcgtaagccaacgcgtatgtcgttatgatctgtcgcaaccgttgaccaccaaaaaagtgacgttgtgtatcaatataaaataatttttgccgacagtatggttgctgcaaagtcgactgcccctcaatcactaattcgccttcgtccgccaaatagtgatcagccatcgtccgaaagagcgtcgtctttccacgccgttccgcccgaccaacccaacgattcgacctggctgccaagtaaaagtaatcccccttaatatttcacgattatcaatccgcttacttaatgctttaacttggatactcatcccgtgactcccccttttgataagccgtggtcacccacgcctgaacttgctgcgcactgattcctaaaaattgtgcttccgttaacagtgattgtaagcgcgtctgaagatcatcaaccgcattcgaatcagttgcaatctgactcgattcactcacaaacgtcccccgaccttttacagtatacacggctcgctgatgctccaagatttgataagccttactgaccgtgttcggattaaggtgcatttctgacgccattgctcgaattgaaggcaattgatcccctggtcgtaagacttcctgaacgatctgctgcttaatctgcataactaactgttcgtaatacggtgccccattagttgcaaacggcattttatcacctcggtattgtgtactacgtgtattactacaactagtacactaacatactaatttgagtttgacaactcaacaatcatattcctggcacaaaatgattacctcaaacgtgagtgcgacatcattacagtatgccaaattactgaaaagagtcttaaatttggttgccagttcatcagtgcttgttcatcctattccgacctccgggacccctgctcgcatgacagatgaacggccactcaacttagtgcaattggtcgccgaattcaattactgcttggaacattgaacaaacgttaatgtggtctcagttgtttggaatctcagtcataatatggtgactgagaattaatgaacgaatcacagttcgattatcaaactgacagttactgataaaattgctgtctctaaaatagcaacgaccaagccagcaaaagttggggacatccctgtcagccattcgaataccttcccaactggaaggcatttcggccaatgctcagcactgccagagtgtgtggttcagacggcttgagactgaggattagcccaactaaggcgttaagcggtaaactcatcgcgtcgctacccggaaggctcatcggacccgaacacgtttcgtcaatatggcattaagacgtgggttgcggcttaaatcagtgtccaccacgttttaacatctacataagcaaaaaaaacgcctgaccaatcagcacctttagctggttagtcagacgtcatcatctggtgattattccaagaaatcttttaactgtttactacgtgatgggtggcgtaacttccgtagcgccttggcttcgatttggcggatccgttcacgggtcacaccgaagacttttccaacttcttccagtgtccgggtccgaccatcatcaagtccgaaccgtaagcgtaagacgttttcttcccggtccgtcaaggtatcaaggacaccttccagttgttctttcaacaattcataagccgcggcatccgctggtgaggttgcgtcttggtcttcgatgaagtcacctaagtgtgaatcgtcctcttcaccaattggcgtttccaatgaaacgggttcttgtgcgatcttcaagatttcacgaaccttttccgttggcatgtccatttcagccccaatttcttcaggagttggttcgcgccctaaatcttgtaacagttgccgttgaattcgaattaatttgttaatagtttcgaccatgtgcactggaatccgaatggtccgcgcttggtcagcaattgcccgcgtaattgcttggcgaatccaccaagtcgcgtacgttgagaacttgaatcctttacggtaatcaaacttttcaacggccttcattagccccatgttaccttcttgaatcaaatcaaggaattgcattccccgacccacgtaacgtttggcaatcgaaacgaccaaccgtaagttggcttcggctaattcttgcttggcagattcatcaccttgttcgattcggagtgctaaagcgacttcttcgtcagccgttaacaagtcgacacgaccaatttctttcaaatacatccgcacgggatcattgattttaattccagaagccgagccagcgtcactaagttccttcttagaaacttttttgacacttttgaccgctcgagcatcaggatcacctttttcatcaacaacactaatcccagcatcttcaaccttttgtaataatttatcaatgccactagcatctagtttgtaaggcgctgctaatttatctgataattcatcatattgaatgctaccagttttcttatattccttaattaatgctttaacggctttgtcgtattccgtcgttgcttttgcctttgccatgtagtagcctcctatttagtatgcatctaccagctgatcggttgcaataccgagccaaccttaagtatatcattttcacgcctagttatcagctcgttggacctgctgttgttgccgatataggtcaattaatgccaacgttaactgctgaaccaaatcacgattaccgatctgcttggctgccgttaactcggccttcttactgttgatttgttctaccagcggctgttgattcatgatcacattgactagatcagcaatctcttccttggaagattcattggccacgtccataaattccaaactcgtgacgacaggctgtaaatctgaatccgtcataaaatccgtaaagttgcccaaatcaaattgattatgcgttttaaaataagcctccgcatacaccaagatttgttgatacgaatcatgaacaaaatgaaaaccagcaatcgccatcacccgtaaccaaacatcgtggtcattcaacaaacggtacagtaacaaccgctccgctttctctacccgacttaacgggccactgttcgtactgccatccaccgtggctgggggtggccctagcggcgcaggtgctggtggcggagctacttgcggttcatccgagtgaccaccaccacgtcgaacggcctgctgaccgaccagtgatcgtaactgttgctttaaatcatccttatcaagatcaaactccgccactaattggtttaaatataaatcctgttcgacactagaggacagttgtgctaattgttgcaaaaccgcctgtaaataagtcaattgatcgggcgtgttttgcaagttcaaatcatgttttaaatactgcatttcaaatgcagtgggcgtttgcttaccatcttcaaatacttggacaaacttctcctgcccctgagcacgcaaatactcgtcgggatccatcccatcaggcatttggattacacccagattaaggcgactgttaccacctagcaatttcagagcacgatcagtcgccttttgccccggcatatcgctatcgtaacagacatataaggtgtcggtaacgcgctcaagcatgtaaatctgctcatcagttaagctcgtccccattgatgcgaccccgttctgaataccagaacgataagccgcaatcacatccataaagccttcaaacagaaccaccgacttttgttgtcgaatggggccccgtgctaagtcaaagttaaataatactgaacgcttgttgaacagcttcgtttccggactattcaaatacttaggttcattaggtgattttttgaggattcgacctgagaaagcaatcacccgaccactcgcgtctttaatcggaaacaagacccggtcaacgaagcgatcacgtaagtcacccgcttgattttcaatgaacagacccgactgccgtagtagttggtagtcggtctggtgttctttaaaaaaatctaacaagagctgattagcaggtgcatagccgataccaaacgttttaatcgtctcatcatccagcccacgctcgtgcaagtacttaagcgccggttcacccagttcagtattcactaaaatatgttgatacattttagcgctatccgcgtacaactttaacagatcggcttgttgctgatccttaggtgcggccggttgtgactgcgccgtatagctcgccggcaagtcaatgtgcccaaaatcggccaccttgacgactgcttccggaaaagacaagttttcgagatccataatgaagctgaacacgttgcccccacggccacagctgaaacagtgaaaaatctgcttttgctcattgaccgaaaaggatggcgtgcgctcttcgtgaaagggacacaggccaaataaattcttaccagccttcttcaactgaacgtattgtccaataaaatccgcaatgttgactgctgagcggacttgctcaaccttttcctcgggaattcgattggccactttgccaccccatttctactaactaaagtctgacaaaccaaccaaatcattgccgcaatcaaaagccgcatcacgaaatttggatgcgactttgtgcgtgcaaacttttacagaatatatactaccacaagtttgacagcagtgcaataataagttgcccttattagacatatttgtcaaatttgtttgtcagcaaactaaaaaagaagctacagcgcgcttgctgtaacttcttttgattatccacagtccgtgcttatttaacgattaattgattcaagtcacccatcacgttgatcatttgggcgatcgtcaagagttgcttcaagtgattatcccgcaccttttcatccttactcatcaccatcgtctgttcaaagtagtcgacgatcaatggtcgtaaggcggccagggctttgaaacggtcctccatactcatcgctggggtaaattgcttttgcaattcaagaacagcatcgtacaaatgttgttccgcctcattttcaaataaacttggatcaacagtcaaatcaccggctgccaacttagctttcgccgtgatccgcaacagacgagtaaaggcttcaattgtgtccttaaactgcggatcatcttgatgcgcattcagcacatcggctgctttgaacatttcacggatatcctgacgactccctttgataaccgtatcgacgatatcgtagcgaatcttacggttgttaaaccattgtttgacgcgatccgttaagaaatcagcaactggtgccgtttgcttttcgaagtctaagttgtacgtagcatcatgggccactaattccttttgaatatcggcctcgagttgacgaattgggaaatcccaaccttgttcccgtacgatccgtacgattccaaacgcttgacgacgcaaagcaaacggatcattagagccactaggagtcaagccaacggcaaagaagctcgtaatggaatcaactttgtccgcaatagctaacaccgcgccgaccttggacttaggtaagtcgccatcagcgctgattggcatgtaatgctcacgaatagcttgaccgactgctggatcttcacccttcaagacagcatacttgtcacccatgaccccttgtaattcagggaattcgccaaccatccctgtcactaaatcaaatttatagatttgcgctgcccggtggagttggttcttttcagtctcagtcaaaccaaaccgatcagccaaaaaatcactgataaccatgacccgctgcatcttctcatacatcgtcccgattttatcatggaagctaacctttttgagtcgttccacatattcttgaatcgagtgttgttgatcttcatgatagaagaaagctgcatcttctaagcgtgccgtcaatactttttgattacctaaagccacgttttccaagtgatccgtgttcccgtttcgaacggaaacaaagtgtggtaataagttatcctcggcatccgttacgtagaagaaccgttgatgatcacgcatcgaagtaatcaagacttcatccgggatcgttaagtatttggtatcaaaatctcccgcaaatgcagttggatattccaccaagttattaacttcttccaacaagtcttcattaactttgatttgccagtcgcgttcattcgccaaggccgcgatctgttcacgaatcgttgccttacgcttagcggcatccgcaataacttgaacactagctaagtcagcttcatagtccgcagcagtggcaatttcaacgtcatggcccaagaaacggtggccccgtgaaacacggccagccgcaacgtccagaatttgaaccggcacaacctcgtcatctaataatgacacgatccaacgaatcggccgaatatacttgaaactgtacgtcgaccacttcatcatcgttgggaaattcatcttggtgatgacatccttgattccggccgccaatacttcggccgccgttttaccagccgtaaaggtttgtacaaagacatacggggtacccttaacatctttaaagacgatgtcatcagttgacgccccttggcccttagaaaaaccaatcgctgcctttgtccagttgccatccgcatcctgagcaatcttcttagctggaccccgaacttcttttttcacatcagcctgcttgtcagctaagcctaacacctgaaccgttaaccggcgtggtgttgagaaggttttaacatcttcaaaatcaagccgggcatcctttaagaacttgaccattcgttctttaagttgcaacacactcggtgtaacgacgtgggccggcatttcttccaaaccaatttcaagtaaataagttttcgccattatttcgtctcctcctgtgcgtgttttaataacgggaagccacgtttttcacgttgcgccacgaattccttggcaatcgacttcgccatgtttcggattcgatctaaatagccggcacgttccgtgactgaaaccataccgcgagcatccatcaagttgaaggtatgactacatttaagacagtagtcgtacgcggggtgaactaagccgttcttaatttgccgcttggcttccttttcatattcatcaaataacattaataataattcttcgttgctatcttcaaaagcgtacttagaattttcaaattctggttccaagaagatgtcgccatacttcacgccatcgccccattcaaggtcaaatacggagtttacatcctgaatgtaagatgagagtcgttccaaaccataggtgatttcagaagtgacgggatcaacttcaagaccaccaacttgttggaagtacgtgaattggctgatttccatcccgtcgagccaaacttcccaaccaacaccggcacaacccattgatgggttttcccagttatcttccacgaaacgaatatcgtgttctagcgggttaatgccaagtttttccaagctttgtaagtataaatcctgcacgttttctggtgagggtttcatgaccacttggaattggtggtgttggtacaaccggttggggttctcaccataccgaccatcggcaggccggcgtgaaggttcaacgtacgccgcgttccatggttcgggaccgattgcccgtaagaacgtgtaggggctcatcgttccggcccctttttctgtatcatatgattgcattaacatacaaccttgatccgaccaaaacttttgcaaggttaagataatctcttgcactgataactttttgctcattagtatcctcccaaaattagtgactgaacggctgatggctttgaaacgggggcatcgctattcccagacttatggcacaaaaaaagtcccctgtcgtcgacaataacgacatagggacgattggtttcgcggttccaccctacttctgagtaacctcagcagcttaattacacggtattaaagctccgaaagcgccaattaacgactttgactgaccgtttttcaccatcacggtctcactgtaagtcgaatccgttaaccttctctcatcaacacttaactattcagttcttcatcatcatagctgatggtcgttcgtttgtcaatcctcattcttccggggcgccaacggttggtaccaactgcccatctgatcgatgaagcgtttagatttcaatcgaacgcccactgagttctgatagatttcatccaaaatccggcgtaactccgctgctgtccgcggtttgaccttgatcgaatgaaccttagccaaatccaacacggaaaactgacgtagataaaagatcgctgctggactagcatgcaagcggtggggatccaaatgccagtgctgttgacagagcaaaccgccgtaactttcagaataatctaacggtaaatcacttcgaccgcaaaccgtacaccaacgcaactctggggccaccccaaacggttgcagtaactgaatttcgaccacgttagccaccaacgcgggggccacatcttgatcaatcagttgcagcgcactggtcaactgttggtaccaccgccccaccggttgattatctggaaaagcgacgtccattaagttcataacgtacgtggcataagcgttcaaagcaatatcttgactaatatgttcaagatactgtactgacttgacactattaatatacgagagaccttgatcacgtaaatcaccaacgtattcccccatcgtgaacggcaataactccgccgccattttgaagccacgccgacgcgcaccgcggataaaaaacatcttcttgccatactcggcagttaaaaacttgattagcatatcgcgttcccggtagtcccggcgaaagagcaaaatgccgttaaaattcgtgaccatttgttgggccatccggatcacctagcgattctaatagtcatcttgccgatagccatagctggctagcaagtcttgacggtccttccagttctcttggacttttacccagagctcaaggtagaccttatccccaagtaagtgttcaatatcacgccgagctaacgagccaatcttcttgagcatgctaccacccttaccgatgatgatgcccttttgcgaagatcgttcaataataatcgtggcctgaacgtgaattttttcttcatcttgacgtttgatcgaatcaatcacgaccgccgttgaatggggaacttcttgacgagtcaattcaagaaccttttcacgaatcaattcagaaatgataaaccgctctggatgatccgtaatttggtcggacggataatactgcggtccttccggcaattggcccttcaaggtcgtcagtagttcatcaacgttatttccttcaagcgcggaaattggataaacttccttccacggcaaagcgtctttatactgatccataatctccaagagatgatctggatggacttgatcaattttattaatcactaaataaatcggttgtttaaccgttttaagacgatcgataataaagttatccccggcaccacgccgttcgtccgcattaatcatgaatagtacggcatccacttcacccaaagttgacaaggcggacttgaccataaagtcacctaatcgactatgcggtttatgaatcccaggggtatcaatgaagaccatctgcgtatccgcagtggtataaatcccctggatacggttccgcgtcgtttgggctttgtcagacataatggcgactttttgcccaacgacccgattcaatagtgttgatttaccgacattgggacgaccaataatcgccacaaagccggaatgaaatgcttgttgttctgccataattaattcctttcaatcttgtccaatcgttaaccaattactagtttaaccaactgacaattaagttccaaattttaggtgcaaacaacactaacccaactaagacggcaaaggccgcggcaaacactaccgcaccagccgcaatgtccttaatttttttagctaggggactgaaattaggcccagtgatcatatcggacaggttttctgcaatcgtattgttaatttcacataagatgaccagaaaaatcgctaatgctagccacagccattcgttaacgctcaagtgaacccaccagccagcaaacaaggccaccgcccccagtacaaggtgtgttcgcatattacgttcttcaatcacaaccgttttaagcccagtccacgcgtgtagccaggactgccaaaacgagtgatttttgccaacctgtagccgatctggtctatttttcgaggccataagcgtccagaatctggcgttgcaatgtaaacatttcggtttcatccgctggctgaagatgatcatacccatttaaatgtaaaaagccgtgaacgaccaagtaacctagctcgcgcgcctccgaatggttcaaaaaagcggcttgttcgctaaccttatcaactgatatcataatatccccgagatttagtggcatttccgccgccatctccggatccatcacaatcaaatcatcctcgtcatcgtcgtgcatcgcaaaactaataacatcagttggacgatcgacaccccgatactgttcattgattttttgaatagcatcgttattcatcagggtcaccgagacctcggtatcatcccgtaactttaacgtctgaccagcaagatcaattaaatcccgaatcaattgcaactgttctggctgcgctcccgttgttgtttggtcgtataattctaaatccataagtgccccctagcgttgttccacacggtcgtacgccgtaataatcttggcaacgaccggatttctgaccacatcatccgccgtaaatttaacgaacgcgacattgctaatgccgcccaaaatctgttcggcttgaatcaagccactcttagtatggtgtggtaaatcaatttgtgagatatcaccattaacaatcatcttggcaccgaaacctagccgcgtcaaaaacatcttcatctgggcattcgtcgtattctgtgcttcatccaaaatgacgaacgcatggtcaagcgtccgtccccgcatataagccagcggtgcgatttcgatgataccacgatccattaagcgctgcgtatgttcagcgccataaatatcgtacaacgcatcataaattggccgcaggtacggatcgactttttcctttaaatcaccaggtagaaagccaagactctcaccagcttcaaccgctggccgcgtcaaaatcagcttctcgacatcgccccgttttaaggctgcaattgccatcacaacggcaagataggtcttcccagtcccggctggaccaataccaaacgtaatatcacttttagcaacggcttgcacatactgccgctgaccaaagtttttgacacgaatgggccgtccacgattgtccttaattaaggtctctgaatagaggtctttaaagtaatccaaagtcccccggttgaccatcttaatagcgctaataacatctggcgccccaatctgaataccttgtttaattaaactcgttaaattatctagtactgcttgcgtattatgaacagcaacctcgtcatcactgctgatcgtcatttgatccccaaacacgtgcaattgaacgtgtaacccatcctcaatcaaagctaagtgggcgtcttctggtcctaataacgcgactgactgggccggatcagcaatgagaaatttttgttcatattttgagttttcggtcaaaaacatggactcctttattgacagatttaatcaccattatttaataatggcacccgcagttagcgtgataaccacgctgatttcagcaggtatttgttagttaatcatagcataaaagcccccatcgaaccagtacaaggacgcctcgacattcgacaacgattttctgaacagcatttttctttcgagcgattaaattggcacgctatcaatcaacgtaagcccagttagatcagtccctgcacccattgcttatacttaatccgaacaaccggtactgcatttctgatcaaccagaagaaacaaaaaaaccggagaaaaatttctccggttaaccgttaattcaataatgatttaactgtttggttgatcagcttgccatccgcctgacccttaagttttggcatcactgcccccatcaccttgccaaagtcacctttaccagtagctccgacttgttgaatggtgtcagcaacaatctgttgaacttcttcgtccgacaattgttttggcatgtactgctcaacaattgcaatttctgctttaacgccgtcgactaaatcttgacgacccgcattttcgaattcacttaatgattcgcgccgttgtttcagttcacgtgagagcacgcttacttcctcatcagccgttaaatcatggccaacattaatttgttcattcatcaatgctgacttaagcatccgtataacgctgagggcttgcttatcgcgtgccttcatcgcagcttttagatcaccattgagtgtatcgattaaactcattggttttccctcctcgttaggtcattagtaatcaatactaattacttgaaacgacgacggttcttacgcttacgtgctgcttcagattttaacttcttcttcacacttggtttttcgtagaattcccgtttgcggtattcttgtaaagtaccactctttgaaacggtacgcttaaagcgacgaagagcatcatcaagagattcgtttttacgaacgactgtttttgccatgttaaattccctccctccgagctcaaaaagtaaccgttaaattatgcatacttacacataacgcaactgttctagtaaattatacataaattgaaaaaggccgtcaaccaaagtttacaatttccttaaaataaatcgttaaaagcaacgtcagttcggacagtaaatcgttttcatcccccgccggctatgctacactaagactattatcgaaccgaaatgaggttattctatgtcagcaattaaagtctttattttatctgattctatcggtgaaacagctcataacgtggccttagctgccgctgcacaattctccgactatgacattcgctatcagcgtttcccatttgtccgcaccgactcactgctccagacggttttgtcgcaggcactgaaggaacacgccgccatctttcatacgtttgtcgatcgccggctcagccaaatcgttaaccaattttgcgaagcgcacgagttgccttattatgacgtcattacaccagctttagatactttttcacagattacgcacgtccaaccgtccaatcaccccggtaccgtacacgcgttaaacaccaactacttcgaccggatcaacgcgatcgaatttgcggtcacttacgatgatggtaagaatccgagtggctttttagaggccgacgtggtcttactgggtgtctcccggacctctaagactcccctgtcactctacttagctaatcgtaacctgaaagtcgccaacttgccactagttcctcaggctcaaattcctgacgaaatttggaaagttgatccgaaaaagatttttggcctaactaacgatcctgaaaagttaaacgatattcgccggcagcgaatggtccaatatgggcttaatcccgacaccatgtattccaacacggataaaattaaagccgagttggaatacgccgacaagatcttcaaaaagattgggtgtttagttatcaatgtcgctaataagtcaatcgaagaaaccgccactttaattaccgaaagcttgaatactgacgacactaataatggctagtatcactaatcgccaactcaccgatgccgcctaagttttcctgacaatcagcgcgtgccaccttctaacggtcagcgcgcgcttttttgcatcatttttcttatcattaattaggtcagctactaatcatcagtcgtgtcactcacacgagctcgacaccaccgtcaacgtgcaacacttgcccagtcataaactcattttgcatcaaataaacatacgccgacgcgacttcggcgggcgttgccacgcgtttcaagggattaccagcactgacggtcgcagcctgggctgccaattgtgcgtccgatagttggcgccaaagaccagtcggcgtccaagtcggtgcaactgcattgacgcgatagtcaggcgccaactctacggcaagtccaacgaccatcgtattaatggcttgattgccaacaatcgctccggaggcattatctggccgcccaccagcacccgaagtaaaaatcagcgaaccgtgttggttaagatggtggctggctaattgggccacttgcagatttgcaaaaaatttatcttcaaccgtctgccgaatcgctgcaatcgaattgtccaagaaccccccacccattgcaccacctaacattgagacgacgtggtcaaatgcgggctgagctgcaaaaaaagtttttagttgcgccagattttgtgcgtctaacgccgttccagtcaaatggtctgatgggcctaattgggtgatggcagctgttacgtgcgccgccgtatgaccgataatatggacatcggcgccttcctgtaaggcttggcgagcaattgccatgccgaaacccgaagtaccaccaatcactaatagccgctgttttttcaattgcatcgtcattttcctccttctaaaacaaaaaacgacaaccgactagcgattatcgttcaattctcattaacgttgctgttcaatatcttcaatcaaatgcggattaaactccccggcccgaagcattgcaatctcatacttataaggtggcaattgatgtttcttatcttccccgacatacggcgtttctaaaatcttgctgatgtctggcaattgtggatgatgggcgaccttattcaaagtatcaaagccaatcgttcccataccgatattcgtgtgccggtccttgtgagcaccttgaggattcttagaatcattgagatggatcactttcaaacgatccagcccaatcacatgatcaaattcattcaggacaccgtcgaaatcgtccttaatcgcgtaaccggcatcactagtatggcaagtatcaaaggtaaccgataacttttcattataagtcaccccgtcgatcatctgtgcgagttcttcaaacgtccggccaacttcagttcctttgccagccatcgtttctagcgcgatttgaacgtgctgctctggccgaataaccgcgttcagtcccttgatgatctgcgcaatggcaacatccgctccggcaccaatatgtgctcccggatggagcgttaattgtgttgcgccaacggcatctgcacgctggatctcttgatagagaaagtccgttgcaaactcaaaataacccggctttttcgtattacctaaattaatgatgtatggggcatgtacgacgatctgccggaggtcatgagcctcgattatcggctgtgcttcgtcaattttcagttcgtcaattggtttacgccgtgtattttggggtgcgcccgtatagatcataaatgtgttggcgccgtaacttgccgcctcattggcagatccgagcaacatgtcgggtgccttcatcgaaacatgtgaacctaatctaagcattgtagtcccatccttttcgcaagtttactaattcctgtcataccttaaagttgccggatacatatgataccggcatgatcactcattatccaaataaatctgtcaagttattctaagcggttgtggtcacccgtggataaaagtacgccaaggtccgctcaatcgcatgaccgtcattacgcgtattccataactgattaaactgggttaactgtaacggcgcacccggcattgctaggacatgattcaagtccaccaccgtccggactaatggtcccggcgcccagtccctaaaatcagcttgcaggcccacttcttgctcatagtggtcccagtcaaagacataaaaaacgattttttgacaatttggtaacaacgcgtagtcaaacacaactgaggagtagtcactgaccaacgtattagcgaccgtcaacaattcatcggtactaaactcaggtaccaatgtcactaggtccgggtaacgggcttgcaaatcacgttcctgctcggccaaatggggatgtaacttaataatcaagtgttggtcgggccgcaactttaattgcttaaaatcagccggcaacgcaaattgaacaccggctcgataagtcggcgcatacaaaataacttcctgttgtttaaacgccggatacttctgataaatggccgttgcagtttgcatcacccagtcggacttacaataccgatccgaacgaggatatcccaagacccgcatccgcgtctgtgggacgtgataacttgctgcaaaaatcgttcccatcttctcagaaccaaccacgtaatcagtaatctgatcatacacggtctgaaaccgacgccgatcatctgcgggtcgctgtgccgtctgtggatcaccccaaccaaatgttttgaccgcgccagcagcatgccagagttgaatcagtcgttgtggggcctgccgcgtcaagccagcggtaaagccataataattatcaagataaacgtccgctgcccgggtaatgacgggaattcccgtcaaggcaaatcgaactgaatcatgaaacggccgtgtcgcaattcccgcctgtgccagttgtgccgccccggtggctgcactcggcaagtaataaacagtcaagcgcccgggaacgcgctggttcaactgctgaataaaatccaaattgtccgcaaagctcatcaaataaatcacctgatcatttttgctaaagtgcgctagccacgatacaactcgcaccagccagacataaattactttcttcacactggccatcctttcatttcatcattaattattggtaaagcgtgccctacgtgacaatcaaaaatgtgccagctcaattacgcttaaaaagttcagattggcgtcaacttacttgagccgtctgccttcgtccactaaatataaacaactatttttcaagtctgttccccattagttgttcattagctctgggtctaactgatatggacttatgatccagcaataacacaatgcttgtattatataacagatgcccacacttcggctagtcgggtcactattaatagtggtgtaaaagtcgtccccgaacgcctaatcaaaaagtgcttgcaaacaagtcccgaaagtcctgtttgcaaacacttttaatctgataaattcatcaaggcttcggttcataaaagtgaccgagaatcttgaccgtatctgaaatactaacgaaagcgtgcgggtcagattcggccatggccgccttcaattcgcccatttcgtaacgcgtgatgactgtaaataaaatcgttttatcatcatgttgataagcaccttcagcgttgtgtacgatggtaacgccacgacgaatccgattttgaacgctatcaatcaccgttttagggcgactcgtaataatcatcacttgcatcttctgttggcgcgtatacgtcatatccatgacccgaccatttacaaacaacccgagtgcggaataaaaggcatatggccacccgtaaacaaagccagccgcaatgacaatgatcgagttgaacgccatgttgatcgtcccaatactgcgacccgttttacggcgtaacacgataccgataatatcgaggccaccggttgaaatcccatttttgagggccgttccggtcccgaaaccattaacagcacccccaaaaatcgcacaaatgatggggtcatgggtcaagccaactggggcaatcagtttgatcataatactagatagcgtaacagctaagaacgtatacaacgtaaacttatgcccaatcgatcgccacgcaataatgaacattggaacattcaaaataaacagtaacgccgcagttgaaatctgaacgggaagaaacttgctcatcaaactattgatcaattgcgcaagcccagtgatccctgaagaataaatatgccccggcgtccaaaagtagttcatggcaatggaaactaaaatggcgtatataaaagcagttgacgctttcacaacatcacgatggtgtttggataactgctgaaaatcatccatgaattaagtgtgctcctttacgtttttgctttcgttattgtaacacgccgatttgcaaacggccggtcttttgcagtattctgctaaaagtctcacgtttctcagcaaactcccattaatcaatccgactaatttccagaacgagccccgctacgatagttattattagatcacacctatcgcgatgaccagcaactcacgcttagtccactttaggtgcatcggcccactgctcggcgatgaaatcagcgcggccacccgcttcttgttccgcaaataccactggattatttttataaaagcgttggtggcgtgcctcggctggataaaatggtttggcattctcaatcgccgttacgattggtttactaaatcgttcgctcacctgtaatgcccgtttagacgcttccgcgatccgccgttgttccggaccattcacaaaaatgaccggccgataattatcaccacgatcttgaaattgccccattgcatcggtaggatccgtttgatgccaataaatattgactaattccgtgtaactaatgatatcgggatcaaacgtaattttgacagcttcagtatgacccgtcgtatgcgctttgacgtcttcgtaagtgggatttttcgtgtgtccaccagtataacccgagacaacactgtcgattccgggttgactatcaaaaggctgaaccatgcaccaaaaacatccacccgcaaaaattgctgtttccatgagaattcctccaattaaatattaatataaatttaacactaattaaaaagaacgtccatttctggacgctcttaatatttttattcggttggttcatcatccgttacgggattggtaatattcaaatccaaatcagctaattgctggtcagaaacccgcgatggtgcattggtcattggttctgacgccttggaattcttagggaaggcgatcacttcacgaatgttgtcattacctgataataacatcgcgaaccggtctaacccgattgctaagccaccatgaggcggaaagcccatgtcaagggcatccagtaagaacccaaattgttcttgggctcgttccttagtgaagtccaatgccttgaacatcttttcttgtaattcgcgggtatgaatccggatcgacccgcccccgagttcataaccattcaagatgatatcatatgattgtgcatgggctttgtgtggatcttcgccatcattcaagtaatgaacatcttcttcattgggcattgtgaatggatggtgagctggtacccagcgctcgatgccttcatcatattcaaacaatggccagtcaacgacccataggtaagcgtattgatcttgatcaatcaagtcaagttccttagcaatcgcggtccgtaagtaacccagcgtgtcagaaactactttgaaactgtcggcagcaaacaataataagtcgcctggtttagcagcagcagcactcgtaatggcttcaaagtcaccatcgttcttgaagaatttcgcaacgggaccactaaagccgtcgtcagtgaccttcatccaagctaagcccttagccccaaaccgtttaacgtactccgtgtacgcatcgatttgctttctagaatattgatcagcaccgccaggaactgcaatcgccttgaccaggccaccattagcgagtgcattatcaaagactttaaaaccggcgttagaaacggccgcgcccatgtctttgagttccataccaaagcgcacatccggcttttcagaaccaaaacggtccatagcttcttgccaagtcatccgcgtaaacggcgtcttgatgtcaacacccttgacgtccttcatgacttgcttaatcaagccttcagtataggactgaatttcctcagccgttaagaaggatgtctccatatcaatctgggtaaattcaggctgacggtcaccccgcaaatcttcatcacggaaacagcgtgcaatttgatagtagcgatcaaaaccggcccccatcagcaattgcttaaagagttgtggtgattgtggtaacgcgtaaaaatgcccttgatagacccgcgaaggcactaagtaatcccgggccccttctggcgtcgacttcgttaagaacggcgtttcaatatcatagaacccgttggcatcaaaatagctatgaactgcttgggtgatgccattacgaattttcaatccacgttgcatttctggccgacgcaagtccaagtaacggtacttcaagcgcaattcatctgatacgttaatgtcatcttgaatataaaatggcggggttttcgccttatttaagattttggcatcgtgaatctcaacttcaactttaccagtcttcatgcggtcattaacagcgtcagcattccgattaacaacggttccttgcacttcaatgacgtattcgccccgtaactgatctgctaccgccaaagcatccgctgaaaattcctgactaaagactaattgcacaattccttcacggtcccgtaaatcaataaaaatcaaactcccaaggtcgcggcgtttttgtacccaaccttgtaaagtgaccgtttggcctaaataatcctcattgatgagacccgcatatgtggtccgtttcataaacgcttcctccttataaatcggcaaacttgccgtttacactacttatctaaaacttgatgagcatcttgatagatgtccgccatcgcaaccttggtttcctcaccagtagccatagccttcaagttaacgacctgatcagccagctcggtttcgcccaccgtcatcgtgtaacgggcattcaagcgatcagcactcttgaactgagctttaggcttgcgatccaagtaatcccgttcggccttataaccggctgcccgtaatgcctgtaccagcttcaaagtcgtagcactagcagtgtcgccaattcccacaacatagacgtccaactgatcatcagttggtaccgcaatgttttcagcatccatcaacactaatagtcgttcaacacccaggccaaagccaacacccgaaacttcagggccacctaattccttaaccaatccgttgtaacgacccccagcacagatcgtcgtgtagcccttgcctaacgcttttgagtgggtcataatttcaaaaatcgtatggttataataatctaatccccggaccatcgtggcatcaatctcgtacggaattgctaatgcatctaaatacgtcttagtttgatcaaaatgcgcttgagcttccggagacaagtaatctaaaatcgatggtgcatcggccacaaattgttgatcttccggtgccttactatctaaaacccgcaatggattcttgtgtaaccgttccttggagtcatcactcaattcatcaaagtgtggttccaaataatcaatcaaggcttgtcggtaatcatcacgcgtttgttgatcacccaacgtgttgatgaccagtttcaaatcagtcaagccaaaggttttaagtaagttatagcccattgcaattacttcaacgtctagggcagcactttcactaccaaaagcttccacgcctaattgatggaactcacgtaaccgacctgattggggccgttcataacggaacattggtcccatgtaataaaccttgtatggtttgagaacttgcggaccgtacaacttattttcaacgaacgcccggacgacgccggcagttccttctgggcggagcgtaatgtgccggtcacccttgtcatgaaaatcgtacatttccttcgtcacaatatcagaagtatcccccgctgaacgtgagaagacctcgaaattttcaaacatcggtgtccggatctctttgaattgataagtcttgaagacggcacgagccgttgcttcaacgtattgccacttttcactatcgccaggcaaaatgtcggcggtgcctttaggccgttgatatctcattaatagttcctcccttgattgcaatcgacaaaaaaagcgcccttgattatttaccaagggcgctattagcgcggtaccacctttttgagtactaattgataacgtctgtaatcacaggcggaacgctgccgttcacctcaaaagcgtctcctcattgcgcactatccggaattctcagcactaccggtctctggttatagtggcgtacaatgctcttactttctctgcggtcgattgattaatatatggttaaagttacacgaaaatcacttaaaagtcaacgattctagttaaaattatctcaagatttcgtcggtcagctgtttttttggtatactatttgcagcacttcaaattgcaattatcttaaatctagttggtgacagagcatgcaagttttaaaacaattttggcgtcaaatcacagtcacggttatttttatcggcctagtgattggctttgtagtgctattagcgactaataacactgcgactgttaacattgccaacgtcaatattcgtagcggtccaggcatgagttatgcgatcgaggacgctacgtctaagggcaccaaggtccacattatgaaacgcaaaaataattggctatacgtccgttatgcggatcataaattcggctggattgctagttggttagtcaacgaacataacagtcagttgactaaaaccaccaaaatctctgaagccaccatcgttttagatcccggacacggcggttctgattccggggcgctctcgagcaagggcaagatggaaaaaacgtacacgttacgggtcgctaaagctgtagctaaaaagctccgggctgctggcgcacacgttgttttaacccgtgattcagatgaatacgtcggcctgagtgcgcgtcccgcaatcgcaaacaagcttcatgcagacgccttcatcagcttccactttgacagctcaccagaaaaaaacacggcttctgggatcacgacctattactatcataagtcaacctcactagcactagccaaggcgttaaacaataacgtctcgaccttgccaattcctagtaaaggaacggacttcggtgactttctggtcattcgtgataattcacgaccatccgtattgatggaactgggttatattaatgataagtcggacttcaagacgatcagttctaaaaagtaccctcaagaagtagcgcacgcggtttacgccggattgagtacctacttcgccaatcaataataatgcagtcagcatgaagtctttgaaagtggccgttattccagtgactgggataacggccacttttcgcgactattcaatcgatgaatcgcatatcaactgacgcggtttacctaaataaccgtctatttgcctgcactttagctccgtaccggacgtctaacctcatttcacactcttacggatcaacgccactaattgttaataacaattaattgcgttacagtgatggtaaccgtatttaacatcgcagcaaggaggagttaacatgcacttaacaaaaacttggctcgcacaactaccactcactgacattcagcaagtgcaaccagtgagcggtggcgacatcaacgcggcctttcaaatcatcacccgtcatcaccaatattttttgaaggttcagccgcacaacgacgttactttctttgaccacgaagtcgctggattgcgactacttggtgcagtgactaagacaccgcgtgtcatcgccagtggcacgattgccacagacggttatctcttattagattggctagcgaccgggactggcagtcagtccgcactgggagcggctgtcgccaaagttcaccatcaacaccacgcccaatttggtcttgaccacgacttcacagctggcaagttaccgaaaattaatcattggcagactgattgggcaactttctatacacaacaacgtttagatgtattagtcaatttggctaaggaacaccatttatggtcagaaacgcgtgaaatgcattatcaccgcttacgacaacaactgttgcaagattcccacatgcacacggtaaaaccaagcctgttacatggcgatttgtggtcaggtaattacttatttgacacgaccggtacgcccgttttgatcgatcccgacgtgttttacggtgaccgagagacggatctggccatgacgacgatttttggtggttttgatactgatttttatcaggcttaccaagcagcctacccggttgcgcccggtatgcaagaccgcctaccaagctaccaactctattatttactggcccacctgaacctctttggtgaaacatacggaccagccgttgaccgaattctcatgcaatattaatacaagcctcgcgacccgtgcagctcattgagaggactcggtcacgaggcttgtatacaattttttagctacaatcatcagctatcacaatatttcgagtgtctagactagtcgacaaaggtcaataagtcgtttaaatccgtaacttgaacttccggggcactagtcaccgtaatcaggcagtcaatatcaaataaatatccggcaatcccagcattgtgaccggcatcgatatccaagttgcgatcacccaccataacggcgcgttgacggtcgacctggtgtttattcaataaataattcaacgcagctggatcaggtttacgtgggaatggctgagcagccgtgaccgcatctgtgaaatattgggctaaacccgctcgttgtaaataggcttgtgcgctttcgtcacgatgggtcatcaaataattgtgaccaccaactgcgataactttttcaagcaccgcttgagcacccgcaaaggcggccggtgcatgctgtaattgtggctcccaacgttgatagcccgcccgtaaatcatgccaatcccaaccatactgagccgcaaccattctttccgcataaccaactgactgttgccgcatcagctggtacgttgtatcagccggaatagtcccacctaactcggcaactgctttttggaaagcttggaccatggctggataagtatctaacaaggttccatcgaggtcccataaaaactcacgcatctcattcactcccgctaataattgtaatagccaaaaagctgaaagtaccggattggtctttcagcttttacttcaacgttgatcagtatcataacaaatcgtgaccggcccatcgttaaccaaggaaacttgcatatcggcaccaaattcaccagtcgcaacggtcacgccactggcagctaattgctgattaaatgtatcatacaatttgctagccaattcaggattacccgccgctgtaaaacttggtcgattaccatggcgcgtctccgcgtataacgtaaactgcgatatcgacaagattgctccaccgacttgttgaatattcaaattcatttttccatctgcgtcactaaaaacgcggaggtttaaaatcttatgcgcgatgtaatccaattcggcttgaccgtcgccatcttgaaaaccaaccaataggacgaaaccgtggtcaatcgtgccccgaactttcccatcaatactaacttgtgcctgctgtgaccgctgaacaatgactcgcatagaagcctcctaaaacattttccgttcgacaacgtaaagatcctgaacatttttcagactgtcaatgattcgttggagatgttccaagttgcgaacccccaacgaaacactaataatgaccatcttgttgtgatcgaccttaccgttgacattggtcaaaaatttcgtgtgattattgataactttcaacacatcgttgagcatgccattacggttataaccttgaatttccaaatcagaattgtagttcgttcggtcaccctcgggattctcccactgaacatcaatcaaccgttcaccatttgcttctgcgctcttaacgttcggacaatcaacacggtgaaccgaaacaccgcgccccttcgtaatataaccaacaatctcatcacccggaattggagaacagcaatgacttagacgtacgagtaagttgtcgacgccttgaataatcaccccaccagaagatgagaccttttgccgcttccgatcctgcttctcctgatcctcattatgatgatctttcgatttcttcttcgctggcgcttccgtagagtctgccaaaatggcctcctcacgttcacgctgccgattagcctcgcgctgtttacgaacatcactcgttaaccggttagcaatccctaccggttggacgtcaccaaaccccaaggccgcgaacaaatcatcctcactaccgtagtgcatcttttgagcgaccgccgtcaccttgtccttagtcatgatttcttttggattaaactctaaatcacgtagctgcttctcaagcaaatcacgacccgtaatgatgttttcctcacggtcagcattgcggaagaactgtttgattttattacgggcccgccgcgtatagactaatttctgccaatcacggctaggaccagttgaactagtggacgttaaaatatccacgatatcaccatttttgatttggtaatccaatggaacgatcttgccattgactttcgcaccagtcgtatggttacccacttccgtatggatcgaatatgccatatccagtggtccagcgccctttggtaattctgtcacgtcacccttgggcgtaaaagcatagacccggtcactaaagaggtcgcccttgacgccctccataaagtcggcagcgtccttactttcatcctgtagctcaatgatttctttgactaagttcaacttgttgcccgactgagtctcttggacctcgtcgcgtttaccttccttatacgcccagtgtgctgcgaccccgtattcagcgacccggtgcatttcaaacgtccggatctgtatttcgaggggcttaccttcaggaccgaccaccgtggtatgcaaagattgatacatattggccttgggcatcgcaatataatctttaaaacgccccggcatgggcttccattgtgtgtgaatcgcacctaaaactgcataacagtccttgattgaatccacgaccacccgaattgccagcagatcgtaaagttggctaaactgtttgtgtttgtcccgcatcttcttataaattgaatagatatgcttcggacgaccataaatttcagcttctggtagttccagatcatggagtgccttttgaatgtcttgaatggcaatctcgatgtacttttcacggtcctcacgccgcgaattcatcaagtggacaatgcgataatactgttgaggattcaaataacgtagtgaaatatcttctagttcccatttaatcgtgctgatccctaatcgatcggcaatgggggcgtaaatttccaacgtttcatttgcaattcgccgctgtttatcgggccgcagatgctgcaatgtccgcatattatgcaagcgatcagctaatttgacaatcatgactcgaatatctttagacatcgccaacagtaatttacggtgattttcagcaagctgttctttgttggacttgtaccgaatcttacccagcttggtgaccccgtcaacaataacggccacgtcatgaccaaacagttcttcaacgtctcctaaagtaacaccagtatcttccacaacgtcgtgtaagaaacccgaagcgacggtttcagggtccatcttcaattcagctaagataccagcaacttgaatcggatgcataatatacggctcaccagattggcgatactgatccttatgcacataagttgcaaaatcacacgcccgtttaactaacgcgacgtgatcactattcatatacttttgaaccatgtccaggacatcctgggcagtccaggtaggttgtttgggcattttatcaccacgacttccacaaagattctatttaataaaaggcacgtgaggttcccacccaacgtgccttgacaaccgttttaacgcaaactcgcgcggggaccagttaacccatatgctaagtaggatatgcctaaatcaactaacgctaagtaatagacatacgttgggaaaaatagatagagcccgacaaaacagcccactgggaatagccagactaaccagcccgtccgttcagtccgacgaatccaccagccaacgactgctgccagcacaaagtcaactacaaagagtagccatacaatctgatgaaaccggctaatactcgtaaatcgtagcaaccatggtatcatcaccccaacgacaagcgcaatcagccaatactggccattaaacttacgaattttttccgtcaaactaactccctcgcttacgctttattgctaaatgactatgattatttattgtacaccaccgaccgcaaaattacactagttcgcaccaaaaagaaacgctacttagtaagtagaggggtgccgtttcggcccgcatgattcgtggacccaggcccactgccgcgataccagcagtttgtaatgtcgccacttcttgtggtgccaagcccccttcaggaccaaaaatcgccagcagtcgttgtggtgcggtcatcgtttttaacgtctgcaccagttggctgctctcaccttgtttggctgattcctcccacgctacgaccccggtatcatatgacacgtgtgctaacaactggtttaaatccgttgcgtagctcacactaggaatcatcgtccggtgtgactgttcagccgcgccctgcgcaattttcgccaagcgggccaacttgcgggcccgcttattcgctgcccatttagccactgcccactgactatcgaaaaacacgaaggcgctcgcacctaattcagtaccacgttgtacgatctgttcgggtttatcgcctttagacaacccacaagcaatagtcactggcaacggcaattcaacatggggcgtcgtaacggccgtgattgtcgctgtagctgttcgaccatcgcttttcaccaaatccgccagcacgacttgatgtgtcgtcgtaacgaattccgcagtgtcccccggttgtgcgcgcatcaccttgacccagtgtttgaccgtctcacccgtgatagtgaacgtttgcccgatcgttgtcgtaatcggtgttgataaaaagtatcgttgcatttcagtcctccactaatcttcagctgttggtagataagccacgataccgtgccagtcacccatttgcgtatgttgtgtaatttggaagcccgcttccttaattgtcgtcatgacgacctggaacttatcatcgatgatgccagaggtaatgaaatagccgccccgttttaagttttgacgggcttgtggtaccaacggaataataatttcagccaaaatgttggcaacgataatatcagcctgcgtgtcaatcccagctaataaatcattggcagccacgtgaacatctttggcaactggattcaagtccaaattcgtttgagctgatgccacagcgacatcgtcaagatcgtaagcttctactgcaccgacgcccatcgctttggccgcaatactcaataccccggacccagtacccacatcgatcaagtgttcaccaccattgatcacagtttcaagcgcctgcaaacagagcttggttgtcggatgcgttccggtaccaaaagcctgaccaggatctagtcgcaacacaagctcacctgattgcactggttggtactgttcccaacttggcacaatcgtcaaatagcgcgtaactcggacggggtgatagtattttttccaggcagtcgcccagtcttcatccgataaagccgtcatactgacttcattaggtgctggattcaacccaaaatcagtcagctgactaacccgctgcttgatcgttggaatgacttccggtacaaacaccgtctcaggataataagcagaaatcttcgccccactggtaacgtgtggaatcgtcgccaaatcgatgatctcaccataccgatcaggctttaaattctgataatccaaggcatcatcaattttgacgccactggccccggcttccattaaaatgtttgccaccgcttcgacagcttcattagaagtactgaccgttacttcagtccatttcatatctttatattttcctcccatcgaaagctagagcgccaagcgccatcgcttaagactatcacgtttttcttagtaacaattatataacaagcctgattaacttgacaatcacctggtcatccaaccatgatgttcatgatcgatggtccggcgagaaatcttggatacgaatggattgccagccacaaagtaccgcaatggtgccgttgtccattcacccttgttgacaattccaattcgcggagtcgccacaacttgttccggttggcgataatgactcaaatccaatgataaggtcgccggttgcagcgtttgtccatttaacgttttatctaacccaagcgcctgcattagcttgcccggtccgttggtcaagttcgcaatgggcactggccgctgctgttgcattcgttcaagccccgcatctggttcaattccgcgaatcaagacacattctggcgtaccggcagcttgtgtcacaatattcagtaagcaccaggccctcatttgataaatataaattgttcccgctgattgccagagtgcgcgattgcgcggcgtttggtggttctgatacgcgtgagctcctgcatcacgggcaccaagatacgcttctgtttctgtgatccaggcggtcaatacaccgctagatgtctgtaagcgcaactgtttacccagtaggctcaccgcaatttcaggtgtcgtacgtgtgcttaaaaatcgttcgattgctatcataacttgttttactcgcccctaatagaaaacggactagccaccttgctagtccgtcctcatgttcatttaatcattatttgcggtctttttggttagatgcttattcaaatacttaatcatgtcggcttcatgcttaaagatccgcgggtgcttttgcttgtgcaaccgaaccgcgatctcattgattttgattcgcccggtccaagtatgactgtacttaacgaccacccgattgttgcgatggtccttaccgaatttcaacacgtaaacgctgtcgggcaccatcagcggtctaatatatgttttatcgtagtcataatgtattgatcgcagaaactgtttcgtgcgttttaacatgtcgttgatctctccttcacaatgtgaaattgattaaataataaattaatttatcgttagtatattttcatatctagctattattatagcagactttaaacaagtagtgtaccaatttgccattggtttagcaagtatcgaactttaattcttataaatttgctaaccatttcagaattgtttttgccgcgtatccgagtatggtaaaatatgattaaattagtaaggttatcaatattagggggaatttactgatgatactcatcgaaagaatttatcgtcgtggtcatgaacagttgacaacggtcgaccaaatcgaaaaatttcaaaccaatgacggttatgtcacatccaacgaagtcctcgcccgcgaaatcggtgcggatagtgaaaactgcttctacaaaaatcaagaaggcaaacgcaaaaaagtcgttgcgaccaaggacgatcagggcacttggcatttaaagaccatcggcacaactgacccgactagcgatggcttattacaactaccgcatatggatgatgtttggggttaattggtgcttacaaccatcttaatcagattacaattgcatctaaacaataacgcaaaaaatggtagtgacatcaatcgatgtcgctaccattttttataaacttaatcagttcggcttttcgtcttcgtcagttttcagaaccgccatgaacgcttcttgcgggatttcgactttaccgacagccttcatacgcttcttaccagctttttgcttttcaagtaacttcatccgccgcgtccggtcaccaccgtacagatgggccgtcacgtccttacggtaagctttaatattcgtccgagcaatgactttagaaccaatcgttgcctgtaccggaatttcaaagttttgccgggggataatcgtcttgagcttggcggcaatctcgcgtccacgcgcaggtgcaaagtcgcgatgtgcgataaagctcagagcatcaacttggtcaccgtttaataagatatcgatcttaacgagatcactggcacggtagccgtctaaatcataatctaacgaggcatagccgcgcgtgttcgactttaatttatcaaagaagtcaaaaatgatttcggacaacggaatgtgataaaccacgttgacccgattactatccaagtactccatcgtatcaaactcgccccgtttacgctgggctaattccatgaccgcaccaacgtaatcattaggcaccataatctgagctttcacatacggttcacgaatttccttgattgcagacgcctcaggcatttcagccgggttttccacctttttctccgtgccatcagtcatccgcacatgatacgttacggacggcgccgtggtaattagttcaagattaaattcccgttcgaggcgctcctgaatgacgtccatgtgtagcagtcccaggaatccacaccggaacccaaagcccagtgcttgtgatgattccgcttcaaattccaatgcggcatcgttcaattttaatttttccaacgcttcccgtaaatcggtgaatttggcattatcagtcggataaatcccagcgtagaccatcggattcatttcacggtaacccgccaatggcttttcggccggatttttcgcgttcgtgaccgtatcacctactcgggtatcctgaatatccttgatgctagccgtaatgtaaccaacatcccccgccatcaaataatcccgtgctaacggtttcggtgaattaacgccgacttccgtcacttcatattcactaccactgttcatcaaccggatccgatctcctggacgaacgatgccttcatgaatccgaacactcagcaccacgccccgataatcatcatagacggaatcaaacattagggccttgagtggcgcatcaagatccccctgaggagccggaatcttatgcacgatttgctcgagcagatcttcgataccaataccggctttcgctgaagctagaacagcatcttccgcatcaatcccaatgtcatcttcaatttctttgcgcaccttttcaggttcagccgatggcaagtcaatcttgttgatcaccgggacaatttccaagtcatcatcaatggctaaatacacgttggctagcgtctgggcttcgaccccttgcgccgcatccacgactaaaaccgccccttcacaggctgcgaggctccgtgagacttcatacgtgaagtcaacatgtccaggtgtatcgatcaagtggaagatataagtctccccatcctttgcttgatagtgtaactctaccgcattcaatttgatcgtaatcccacgttcacgttccaagtccattgagtccaacacttggtcttgcatctcacgtttggaaatcgtatcagttagttccagaatacgatccgccaacgtcgatttgccgtgatcaatatgggcgacgattgaaaaattccgaatatgttgttgtcggtcttgcattgtcgctttatccattgattttcctactttcttcctaaatcctaatccctacaattataccaagttagtggcacaagcacaatttttctatcagaccgctccagacaccccgctgcgccactgaataaatgacgtaacaaaaaagtacaagccaatatggcctgtactttttagtaggttattcaaaatccttgatttcactgggtttgagtaattgccattcttttgaatagaagtcgtcattaatctgataatgaaccggcttcgtcttcttagtcaagaatggatcaaccttttgatccacggctaaccaaccacgccagccaagatgaatcgtatcagtcatgaagtagtccttaccaccgtcctgggtcaggtccaagacgttattaaacccttgactcttcaactggtactgaatcttcttgtcaaactgagcaatcatcttcattgacagtccggtataagcagaccagcgttgattgattggtggaatgatgaacaagacatcggtgtgtgtctttgcaaactgattcaaaaccagttgaaaatcggcaaattctggtgacttcgtgtaattcaagtgtcgctgtgaatctttgagtcgcttgtaattacgttttaacttcgtgttccaaaattgattgctgatttcaagactgttcgagtccgtttgcgccgcaccgattttaccggctaattggtttaactgattaaagttatatgtcgctggtaacttgttagcttgcgcattgacagtccgtaaatttttgcccgcaattccaaaacgtgagaagaactcatcctcactgccaaggacacgtgccttatagttaatatacgtcatttgtgcgctcgttggtttaaacccagctgccacacgtgccagggcgccttccaaaatgcgatcagaagaacccgatggcatctgtaacaaacgttgagcggcataccggtccattgccgtattctgctcatcctgtaaccaatcaatggtctgcagtggtgagtaatagtacgaaaacgcatctttccgcgttccttgtggcacaaaccattgtggcgaaattacaaagacggccttcttatttgtaatctgctttttcaccgattgcatcgcgaaatactgcgtcaacgactgggtcccccgcgcaccgagtagaaatggtcggtaattgcggtgatattttgttgccagtacggacggatgcattggatcaaatcgtgaccattctgaagaaccaaagaacgggacatagccatcatccagcgcctgtcgtttaactaaccgaccttttaatacgttggctgacaaggaaacggccgcttttttctcagtatccttagaaatatggtttaatccaaatgagaacggtgaaagcagtacggccaataataagacggctgccaaaataattggcccaaaaatcttaaaaaggcgtttggcaacgttcattgcaagttctcaacctttgcaacaatcttagccggtgtatcccattctgaccgttgaaattcagagaccggcacttcgattcctaattgattttgaagttccaataaaagttggacggaacccattgaatctaagattccttcatcaaacaggttaacgtccatgttactggaaacatcttcccccgttaagtctgctaaaattgataaaaccgttgcttttgtatcatccattgtcattacgctcccttattgtaattatattatggccgggctccaaagaataacgtgttcaagaatcctgagaagatcaagaaactgaaacaaacgacgttaaacgttaggaaaatcgcaaagtattccgtaaatttattagacggcaactgcgcttgatgtttcttcttgtaccgtaaccaagcatcgttgacaaccattgctaaaccatggaatagcccataaacgatgtaataccatgtttccccgtgccaaaaccccatgatcaacatattaataacgtatgccacgttggccgttgtgatccggctcttaaagaccttgtgtttcatcataaagaataccaaccgcatgtagatgaaatcacggaaccagaaggacaacgtcatgtgccaacgattccagaagtctttgatgttctttgacttaaacggttgattgaagttcatcggagtttcaacacccatcaggtaactgataccgacggcaaacaaactgtaacccgcaaaatcaaagaataaatccatactatagacgtacatcacaccgactaacgcccatgacatgccgtgagcttgcaaggccgcgtgttcaacgacaggtagcatccgcgtaccaaagatataagccaaaatgaacttatataagaatcccaagaaaatgtagcggacccctttttcaactaacccgagatacttttcacgggtcgggacactatcgtaatccttaacgaaccgccgataccggtcaatcggcccagacgagatcgttgggaaaaacagcaagaactggccaaacagtaccggatggaattctttaatcaccccatcacgggtctccatgatcatctggaccactttgaaagtcaggtaggaaattcctaagaaaccaataattgaattagcaccatgtgccacggctggtgtgatcttaacgacagctagtggaataatcgctaaaatcacactgacaacgaaaacccagcccttattaggtgaatctggtcgttgtcgatactttgagtacaaccaaactagtgtgatctgatagaccaaatagataattaacgcgatcccagtgcgccacttaacaccgccaaaggtcagcattaagaagataaacgatatcaatgattcataccaatgggatcgccgaccatataacaaaccaatcattaacggtaacaacgcgataaagagcagcacaaagtacgttgggttaccatatgggtcaaaagaaatcattctgggttaacctctttaatgatcgacttgacatcaatcttaccgttaggcgttaatggcaagctcgtttgatagacgaaccgttgtggaatcatgtattccatcatcattccttgtaggtcctttttaattgcagtggtcaaagcaaagtcactttcgaagtcattcggctttggtaccacgtacgcaatcatttgcgttactttgtgctctttatcgtattttggaacggcaacggcttgtttaatatgctgttgctgtgctaagaagtgatccacttcttctagttcgatgcggtaaccatgcattttaatttgaaaatcaacgcggccacgataacggaacagaccgtccgcatccatcgtgccaatatcaccagaatgataggcgggttgcccgtctaattcaaagaaagccttggcagttttttcagagttgttcaaataccccttcgaaacggatggtccggcgataatcagttcaccttccgtgccatttggaaccgcctcaccattttcatcaaccacaagtatccgcgtatcagctttggcataaccaattggtagccgatcatactgcgctaatgcggcatccgtaatttcaatttgagttaccgcgacgcaggtttcagttggcccgtacgtattgaagatccgggcatctgggaaccgtttcttgagtgtcgccgccgtcttatgtgtgagttcctcaccacagaacaagaagtgcgtcaaagttggcaagttttcagcattaaactttggttctagcaaacaaatgtccataaatgatggtgttgagacccaaacgttgattggtaacgtcggcaacgcagcaaataattgtttgaaatcatctgtcacggccttcggtaatgcgtatagtgtcccacctaacgctaaggttgggtaaacgtccatcacggataggtcaaatgaatatggtggttgcgacagcgagttcggctggtcaggcaatccgaagtcatcactcaacatccagtcaacgtaactgaccaagttatcatgactaatttggaccccctttggcatcccagtggtaccagaagtaaagataatatagtaattatcatcgccactaacgacatgatccgcttgataatcaacgggagtcgcaaagatagccgccaattgatctggtgtaatcacgggggttgtcccgacaccggttggcaaatcagcaacagcaataacggcagctggcttagcaatctcattaatcattgttaaccgctcatttggtgaatgtgtatcgattggaatatacgcccgacctgacttaacaactcctaagaaagtcgcaatcatttcaaacgtctgaccaccaaacacaataattggatccttggctggtaaatcgagcgtgtcaagatgcgccgccaaggcatctgaataagcttttaattccgcataagtgtgcgttacaccttgcacatcataaaccacgttattgggttgcgtccgtgcataatcatcaatcgttgtaatgatgttcttaatcataattaaaactccccccaaacaatagtgttactgcatccatttttaaaattcgttgtaaataaacttcgcttggttgatcccactataaccgtaaagataaaccaaggcgagcatgacagcaaagtaaaatactgtaagtgcaatgaattgaacgaccggacgttgaaaccagcttttcaactttgcaaacatgccatcacctcctccactaacccaatgtcagttacttaatatcacccttcattaattccgtaaaaatcttgttggctgttgcttgaataccagcagctttgcgatagtagttactcattaatacaacaccagtcttcccatccggtgagaggaagatgctggattcatagccataaccaagtccgtgtgaccgaataccattactcatgttataaacaccaccgccatattcacctgtggctgtgcgcgtgtgcaaaattgcaacgttcttttttgacagcaactgccctttaagaatggcactttcaacggtaaataaatccgctgtactcatataaacttgcccagtacctaactcattggccatttgtgatttgctttctggcattgtttgatcataattcggaagtgtttggtctgcaagcgctcggtaaccagttgtcgcatcttgaccttgaccatgaatcaaaaagcccgtttcattcagattcaacttgtcaataaaatgtgttgtaaagaagtgctgatatgattgaccagttaccttgcgaataatgccagctagcaacagaaaattaacggatgaataattataaattccatttttatctgggtagtaaaaaacattgtgagccgcaaaatcaatcacttgattttctggtaagaattcttttgaaccgctcttcaaacggaaccctgttgtcatatctaacatttggcgaagcgttgtctgacgcccatgctttaaagttggataatacttcgaaatcggatcagtcagcttaactttccccgcctgcaccaactgcataatgccaaccgccgtcattgacttttgaatcgataaaatttgatactttgaattgactttattacgttgatttttagccttgtttgcgtaaccaaaggcacgattataaatgacatggtcattcttaacaactaatgctgaccccacaaaatggcttaggtttaaagccttagtcacttgctcatccgtgttcttattattcgaaaacgttgtctggttaatcttacgactaagctggctattttttaatgccgctttcttattcaatgctttgtcagtttgacgctttttagcaatcgctgcttgccgctctgtatgataaacatagtagccgccaccagcacccacaatcagcagtccaagcaaaactgttactaaaagtttgctttgcttcacaatgattgacctccccattagctatcaattacgaaccgattggtgatattagctacgccgccaataggacgtaagttcaagttatagtgtaacaacctaccgaccaataacggttaggccggctcaaaaagatcaaaatcctgcattttcgttcgctgatacgacatatttgtaacggttttgtaacatcaacgttacgtcccccgtaagctagcagcgtattacttcacctccttgactaattctagcactcactaatccccggacgacaggataacgaaacagtttgcacaaaaaccgtgttactgaaaggtcacttaataaacaggccggagtgcttgattgacactaaaaaaagctgaacaatcctcatcacatttttgtgatgggcatcgcccagctttttgtatatttctggaattagttcgctcggttaaacaccccgaagcttgtcaaataacgaactcttgccattgccagcaactgatttgccgctagctttagcaaaggtcttcaaagcttctttttgacccttgttcaagtgcgttggcgtttcaatattaacggtaacgcgttcgtcgccgttgccattgccacgtaatcgtggtgcacctttaccacgtaaccggaaagttgtccccgtctgagtaccagctgggatcttcaacttaacgtccccgtgaaccgttttaacttgaacttcatcaccaagagcggcctgaacgaagtcgatcggcaacttgaagtaaatcgtcgcgccatcccgttcaaagtccttacttggctcaactctgaagataatgaataaatcaccataagggccaccattcgttcccgcttcaccttgattttgaagccgcatttgttggccttcttcaactccagcaggaaccgtcactttgatggaatgactttgttcagtatgaccagagccaccacaagtggcacacttgtccttgatttctttaccagttccatgacaaacgtcacaaacttgttggctcatcattcgaccgagtggcgtattagtctgtacctgaatatagccagcaccatgacatttcgaacaggtcactggtgacgttcctggcttggcaccagagccaccacaagtctcacactgttcctcacgattgtaggtgatggtcgtcttcttaccaaagatcgcatcttcaaacttcagtgtcatctcatactgtaagtctcggccttgttgcggggccgttgggttagaacgccgtgaaccaccagcgccaccaccgaagaaggaactgaaaatatcttcaaagccgccaccgccgccgaagccaccaaagtcttgaccgccgaaaccgccggcgccaccgaaaccttgttggccaccagtcgatccgaattgatcatactgtgcccgcttctgggcatcgcctaacgtttcgtacgcttcattgacagctttaaacttttcttccgcgccaggttcatgattcaaatcaggatgatacttcttcgaaagcttgcggtacgccttcttgatttcgtcctgactggcatccttttcaacacccagaaccttatataagtcttgctctgccattgtaacctcctaatgaaccttaattaagtctcattaatactagcatatttaaagcaaaaaggccaaagccacgtggccttggcctttttgttctgccggtgctacttcttatccttgtctttatccaagtcttcgaaatcaccgtcaaccgtgttgtcatcactgcccttggctgagtcggcattgccagcagcattactgtcggcaccgccttgtgcaccctgagcttcttgagcttgttgatacaacttaactgataagtcctgaacgatcttgttcaaatcgtccttcttggccttcatttcgtcaatgttgttatcatcttgagctttcttcaaagcatcacgagcatctttggctttcttaacttcatcttctgaaaccttgccttcaagatctttcaaagtcttgtcggtagtaaagatcaattggtcaacttcgttcttcaagtcaacttcttctttacgtttcttatcggcttcttcgttttccttggcttccttgaccatttgatcaatttcgtcgtcagaaagacccgatgaactcttgatggtaatcttttgttctttattagttcccatatccttagcagatacgttaacgatcccgttcttatcgatgtcaaacttaacttcgatttgaggaacaccacgaggtgcagccggaatatccgttaattggaagcgacctaacgtcttgttatccgctgccattggccgttcaccttggagcacgtgaatgtcaacagctggttggttatcagccgccgtactaaatacttgcgacttgctggttggaatcgtcgtgttacggtcaatcaacttagtgaagaccccacccatggtttcaataccaagtgaaagtggcgtaacatcgagcaaaacaacgtctttaacatcaccagtgatcacaccaccttgaacagcggcccctaaagcaaccgcttcgtcagggttgatagaatggttagattctttgccagtccacttttcaacagcttcttgaacagctggaatccgagttgacccaccattcaagatgacaacgtctaagtcactagccgataaatcagcatccttcaaggcattttcaacaggaatgcgcgtcttttcaactaggtcagcagttaattcattgaacttagcacgtgttaacgtggtttccaagtgcaatgggccactagcaccagcggaaataaatggcaaactaatttgagcttcagaaacacctgaaaggtccttcttagccttttcagcagcatcctttaaccgttgtaaggccatcttgtcttttgataaatcaacaccgttgtcagctttaaagccatcaactaaccagtcgataatcttttggtcaaagtcatcaccaccaaggtgggtatcaccatttgtggataatacttcgaagaccccgtcgcctaattccaagatggaaacatcaaaagtcccaccaccaaggtcatagactaaaatcttttcatctttgtcggtcttatccaaaccataggctaaagctgccgccgttggttcgttaataatccgttcaatgtttaagccggcaatcttaccagcatccttagttgcttgccgttgggcatcattaaagtaagctggaacagtcacaacggccttttcaaccgtgtcacccaagtaatcttcagcaaagcccttgatatattgcaaaatcattgctgagatttgttgtggggtgtagtccttaccttcgatgctaactttgtaaccagcttcacccatgtgacgcttgattgaagctaccgtattcgggttagtgattgcttgccgcttggcaacttcaccaacttgagtttcgccatctttgaatgccacaactgaaggaaccgtccggccaccttcaggagtggtgataatcttaggttcattaccttcaagaaccgctaccgcagagttagtagtcccgaggtcaatcccgataattttattacttgccataaattaacaaacctctttttaatttagtatttttattgattaattactgtgccacaacaaccattgctggacggagggtccggtctttcaataggtaaccccgttgtaagacttgtactaccgtatcagctggatgatcatcatcaactggcaccgtttgaacagcttggtgaatattgggatcaaacttttcgcccgcagccgcaatttcggtgaccccatgttttttcaaagcatcctgtaaatggccatagaccatttcgacacccttcttcaactgttgggccgcttcatcgtcagctggcgttgccaaagcccgttccaagttatccagaactggtaagacatcctttgcaagtgcttgaccgtcatatttcaacagcgccgcttgttcttttttgttgcggttttgcatgttgacgatctccgcctgtgcacgcaataactggtcatctttcgcatctaattgcgctttgagatcagtaatttgttgtgtcggatcgaccgctgtcgtttgctcagcttgatcatcagtcgcactcgtcgctgcctgtgtcgcttcactggcagttgacattgctgctgaatcagttgttgacgcttgtgaatcttccggcgtcgtccgcgttgatttctttgccaatgttttcatctccctgtccgtcactcgtcaaagtaccggtaataatctaataatttgcgggctaattctcgttggaacgcacccatcagtccaatcatccgtgaatacggcatggcggtcggcccgagcaaggcaatcacaccttgtccgtgttgatcaacatcgtaagtcgcggtaattaaactgtagttcttcaacaaatcgttggtgatctcattaccgattcggacttgaatccgttgaccgggtggaccaatcacgttagctaaccggtccgtttggtcgagtaacgagtacaatgactgtaactctttagggctctgctggtccgtatagttgaacaaattcaacttaccaccaacataaaagcgctcggaagctgccttggacaacacactgccaaaaatatctaagaaaccatctggatcttgcaaatactgtgcaagttttaacggaatctcatgcgttaattggcggaggacgtcttgtaacggcaggccaaccagttgatcgtcgatgaaacgaacgaccggttccagctcatcgccggtaatgtcactaggaatagtaaacgtctggttttcaacgtcaccattattcgtcactagaatcgccattacttgatgattccccaacggaacgagtctgaaaccactcaaccgactatctttaagttcaggtcgcaatgtaaaggtcgtgtaacttgtcagttgcgacaagatatccgccgactgagcaacgatctcatcgatcttgtgaaattcaccgcctaatgaatgttgaatcaccttcaagtctttgccatccaccttttcaggctttaggatatggtcaacatagtaccgataccccttaatcgatggaattcgccctgaagacaaatgcgttttgacgattaatcctaaatcttctagtcgggccatttcattacgaatcgtcgctgaactgaccttgatcggtagttcttgaactagcgatttggatccaactggattaccgccctcggtatagtcacggacaatggcctttaaaattaggctttgtcgttcagttaacgtgatcatcacctctttttagcacttaacttaatggagtgctaacacaattactaatataacaaccaccctgatgaaagtcaaggaaagacaaagtatttctagaaaagaatgcttaaattattaggacaccagtcccactatgactggacttaattgaccgtcgcccccaattagcactccttacttacgagtgctaatatacaccctcacccttcacaatgcaagcatggtgcctagcagactactcgcttttctgctgccattactcagcacaccagccacaacaaaaaaatctcaagagttacagactctcgagatttttgactagcctgatgtacattgccaacagacattctagtgaaacctggccttaacggtaatcagctttcaaactaatcaacgttcagctttattaatggcatgatcaatggtttcattatcaaattgttcttgtaagtacgcttcattgtcgattggcaagtgcacatgaaagtcagcaaaatgttgaactttcagcgtcgcttgttcgacttcaaaccccagcaagtgtccacctaattgatggtctttacttagaaagtgtaagtgaaagccaccgaccgtagcgccttggaacaaatgcggtgcgtagtagccaataatcgttccgtcaacatgttcaccggtgaattccggttgtgttgccgttgccgcgactaatgttttgtacggtggctcctgacgaggcgcgactcgcgtcttgacttttgcaaaggtcccatcgacgcgaatagccgcaaacacgttggtcaaacgatagtcatgaaccacttgttgctcgaaatcagtttgtgtgattgcagctaattgcgcactaatatcaggcttttcaaagtgcaccgatgcaaatggtaacgtctcttcgggctgaatttcccgaatttgaccatcctcacgtgcttgataggcgtgacctcctagaataatcacttcaccattgagaccgtctaacgtcccaatacccgtatcaccatgggttaagagttcaccagccgtaatcgtcccgtcaaataatccgggaacaagtaagcctaatgtgccgtgttgaaaaattgttgttgtgtccattcattgtgcctccaaacgatttgattgttgtgcaacttgaatccggggtgtgaccacaaagggatgcgccacataatagtcacgggtgttttgttcatcccgctttaattgcgcaaccaaggcatccgccccagcaaatttaatttcaccgcgcatccggtgcccccaacgcaccgttaaattgtggccataaagatctccttggaaacctaataagtatatttcaaccgtgattggtcggtgatcaccaaacgtgacatttcgtccaactgaggccattcccataacccagcgtgtcccaatctgcaccatcgtcgcgtaaatgccaattccgggaacccgggtattgggcccgtgagcaacgttggccgttggaaagccgagcgttcggccccgcgcttcaccatgaactacttcgccggcagtttcatattgatagcccagtaaccggttagccgtatcgatatctcccgcgtccaaagcgcggcgaatccgcgtggaactgatcttttcagcatctaattccgccttaggaacttcaatgatttcaaaccggttatgaccatagtcattcaaacgctgcatatttgcaatttcagctggcccgtacgtgtaatcaaaaccagcaaccaccgtttgtgcgtgtaatccaacaattaactgatcgacaaacgtttggggtggcatggcaccgaccgtggcatcaaagtgaagtacatataagatgtcaacgccgagctcactcatcaatgccgttttttgatcaattgtcgttaaataacggacttgctgcggatcagtgtgtttaaaaacaactgacggatgctggtcaaacgtcatcaccgctagtttggcgtgttgcgcctgagcggcctggcgtgccgttgcaacgacttgctgatgtccacggtgaacgccgtcaaaaaatcctaaggccaatacgattggtccttcgggaatctgactcaacgccacgggatactttaaattaatcacctgcatgacaaaaactccttaattgaccgcaaacattttgaacggcttgtaccgctgttcgtccggtcgataactatatagacattttaggctgttttggtaaactaacgcaaccatcgtgttcgcatctggatcagtttgttgcccttctgccgccgtaataaaggctccatttttgacccgttgccactgctcatccgttaacgtgactcgcgggtactgacttaaagctttatcaattggcgccaataatgctccggccgttccagcatcgacgtgggccgcgatttcctcaaaggtcacggtttcatctaaagtaaagccgccactctttaatcgggtcaaatcactcatcacagcgggtaccccgagcactttgccgacatccaccgctagcgtgcgaacataagtccctttactacaagcgaccgtaaaatagatcgtctgagtctgggttgccgagtcataggtagatgcctgccgttgcttgaagctgctaattgtgatatgccgttctgggcgctcgacagtttcaccactgcgcgcatagtcatataaacgccgcccatttacttttactgctgaaaacatcggtggaatttgcgtaatggcccccgtcatctgtgccagcgcagcatcaacttggtcacttgtgaacggctctgtgaccgcttggcgcgcaatctcctcaccatctaaatcttcagtagtcgttgcaaatccgagggtaatgctcccttggtattctttgccagaagccactaaaaattgcacaactttagtcgcattcccaatacaaatcggtaaaacgccatccacatttgggtccagtgtccctgaatgacctactttgcgggtctgatagagtcgtcggattttagcgacacagtcaaagctcgtcatcccacgaggtttatataatggtagaatcccgttcaacataaaaaacgccttcaatcatttaaattcggtttctagtggcagccaatcgccgtgccacggattcgatcgttcttaatcgacggttttcagtataccacacctcacaaatatgtaagcggattatcacagaattcaaggccctgagcaccgcaactaagataccccaaatcgacacgctggtccggtgccactgacgaccacgtatgtgcctggcaaagctgtatttaactcattgatccagaaaaccgtgagcttaatccctattagtcaaataaaacgactgaaaaacaagaatcgcacaaattagtccccttatcaaaaggataccgcgcgggaccgtccctaattacgccgatgactttcaacatatgctgccatcaaaaaagcgtgcaacgaccttagtgtggctgatgtacgcttattcaatgttatcgtcttaaaatgcaaccggcacgctaaccacagttgacagttacatggttcttcaagcctggagcgcaactggttgctgattcagccactgctgaatttggcgggcaatctgctggggtgtcagttgatcggttgcgatcgtcaaatcggccgcagcggcatataaggcttggcgccgttgcttcaacgcaatcagtgcccctgtatccaattcattgacaagtggtcggctagtatcatttttaacacggttaatagtggtttgatcactagccgtcaaccagataactggcaccgtgctttgtttcagactaattgcattcattgcaatggtcggagtaccaccaccggtcgataaaatcccgggtgtttcgagtgcttggagcaaagtctgatgctccaattgccggaagtacccctctccttgctccgcaaaaatagtcgtaatcgaccgtcccgcccgctgaacaatcaaatcatctaaatcagcatgtttagttgctaacccggccgccaaaagccgaccgaccgttgttttcccactacccataaatccaattaaaattgctcgcattcttaattcctccttacaatctgataacccgcatcagctaacaacgacgatgcttgcgttctcgtctttagatcactaaacgtcagttgcaagacaccatcaatctcttcacgaatctctaaaatatgaatattgactaagctcagctgagcctgtgcgagccgctgagtgacatccgcgagagcgccaacacggtcggggacgttcaaaaacaaatcataaaagtttggtagtcctcccaactgttccggtcccaagtgatcacgcgtcaccttagctgtcgcaaaaaattcgtacaatgttgcttgatcatgcaccctaatggctgtcttgatgcgcaacagttggtcaatataatcctgcaattgattggttattagttcagcattagtcatcaggatggccgcccacatcgtggggtccgaactggcaatccgagtaatacttttaaacccaccagccgctaatcgcaacccgagtgccgaatctgccaaagccacctgagtctgatcaactaaagccgcagcgacaatatgtggcaaatgacttaactgtcctacaatccggtcatgctgtattgcagtgaccgtcaaccatttgacgtgagtcgcttttaacaatgcttgcagccgttgaacggctgcttgattagtccggcccggcactaacaagtaaaaggcgttctcgaataagttggcgcggccagccgtcacacccgatttatgtgaacccgccattggatgaccgccgatgaaagtcacaccgtgctgttgtatggcaagcgcggcatgcatcaccacttgtttagtactcccgacatccgtcacaagcacccctgccttgagtggcatcatagccagtcggtgcaagtcagcaacgatcacatcaactggccccgctaaaataatcacatcagcgtcgctcgcgaccgcggccaaatcagtgccactagcatcgatcataccctgttgacgcgcataactcaggctgacatcgtcacgatcaatcccaataatgtgcaccgtgggatgggcctgcttaatgcttagtgccaacgaactgccaattagccccaaacctttgatcaatacagttgtcatcttcacaccccctggcttaaacgtgctaaatcttcaaagaacgtcgggtatgaaatgttcacagcttcggcggactctagttcggcgggagcggctaatcgcaacgctgcaatcgccaccatcataccgattcggtgatcgccatggctggctaatggctcggtcggctgccgccaagacttgcgaccatcaatcacgaagccatccggttgcgaagtgatctgaacaccaagttttcgaagctcggtcacaatcgttgcaatgcgatcggtttccttgactcgtaattcagcagccccactgattgtgctaataccattcgcagtcgcagccaacaatgcaactagtggcagttcatcgattacggcaggaatttcagtagcagtgacttggaccggatgcagttgtgcaaaccgcacgtcaagcgtgccaactggttcgcccatccggtgttcatgatcgaccgtcacttgaccacccatccgtcgtaaaatgtttaagaaacccgttcgtgtcggattcagtcccacgttcgttaaccggacatgtgaatttggaataatcgtcgcggctgtcacgaaaaacgcagccgaggaaaaatcgccaggaatcgttagtgactgaccaaccaaggctggctgcggttggaccgtgattgttcgttgatcaggcgccgtttcaatttgaccaccaaattgttgcaacaaccgttcagtgtggtcacgagtcggtaatttttcaataatcgtacttgcctgatcggcttgcagggctgctaaaatcaaggcgctcttaacttgtgcactagcgacctgcatctcggtacgactaccatgtaaagtccgaccagtgatcgtcatcggtaagtgcccggctgttaattgtacctgcgcccccatggcttgtaatggttgacgcactcgctccatcggccgttgactaagggacgtatcgccgaccaaggtcgtctcaaacggttgaccggctaacaacccagttaataagcgagtggccgtccccgcattccccatgtctaatggttgttgtggttgggtcaacccacgtaagccgcggccactgatcgtaacggtcgtatcgacacgcttgattggcacccctaacttttgcagcgccgttaaagtcgataagcaatcggcggctggcaaaaagtggtgcaaggtcgtcgtcccttgactaattgcccctaaaatcaagcctcgatgtgagacacttttatcgcctggtacacttaagtcaccttgtaacccactagctggttgaatacttagtttttttatcattaatcatcatcacctaatttatttgatagacgcaccacaccatcgaaggtgtcaaacgtgcaagttcacgttcatgagtcgtcagtgtcacgtttttctcattagttagcacgtaggccgcctgattacgttgataagcctgatacgctaaatacttactggcgactgtttgcaccacgacctgatgcacgaccctcgtcaacaattgggcggtcgctgcatgcgtgtaaccaatttgattatcggcatttactcgttggagcacgacaagtggatcgagctgggtcataaaacaactgctcaacgttaattgggacaataatgcgtaatgtatatccccccagctggcattcagtgtgtctgatttgaaagcagctggtatcaccagttggtcaccagaataggccgttaaatcagttaaaatggtttcaaagctcgggtgtttgacaatcaccgcttggtcctgccagttgcgatgattataaacttgcgcggccgcgtaactatccgtggcggtcgggcctaaagtatgaatctgcataggccctcctaatattgtcggagttcttcgcggtatgccgtcactgtttgctggaagcgagctaagttactcccgtcaaacgttgccgtcaatgctcgcgttaattcaatcgctaccacactttcaaccacaatcgaggcggggacgatggccgtcgtgtctgaacgctctacgctcgccttttggctgactttggtcgcgatatccacactttgtaatggtttgtaaagtgttggaatcggcttcatggcggccttagcaacaatcggcattccattagtcatgccaccttcaaagccgcccaaatgattggtcaaccgtgaccagccggcgtgttcatcccaactaatctcatccatcacttggctaccataatggctggcagccgcaaatccatcaccaatttcaacacctttcatggcgttgactcccatcactgctgcagctaactgtccatctaatttggtatcccagttcgtgtaactgcccaaaccagccggcacattttcggcaacgacccggataacaccacccaaggtatccccggccttcttcgttgctgtgatcagctcatggatttcgggaaccaaggccgcatctggtaatcgcaaatcattttgcgcgatttgggcttgtaattgatcaacggatagtgttaaatcggccgtcacttgcttagggccaatttgttgaacgtagccaactaggtgaatatctagctgcgccaataattgcttacaaatctgaccgatagccactcgcatggctgtctcacgagctgaggaacgttctagcacgtttcgtagatcgcgatgaccatacttcattccgcctactaagtcagcatgccccggacgtggacgagtgacttgccgcaacgtattggttgccgtagctggacttaccggatccatgattgctgcccagtgcgcgtgatcgcgattcataatcgttaatgcaatcggggaacctagcgtaacaccgtgccgcacgccaccagtgatttggacggtgtcatgttcgatctgctggcgattgccgcggccaaacccaccttgccgggctgcgaggcctgtattaatggcatcaatgtctagctgtaagccagccggaataccggtcagcacccctgtcaattgaggcccgtgcgattcgcctgccgtaacgtaattaatcatgatcaatatcctccttgtgtaaattcgtgtgtaaatccgtctgatatgcgcgtgagttatgcataattgcttgataaatagcttgtaaataaggggtatgcgcggtctggatactcttcaccgcaacttgttgtaacacccgttgttcacgttgctggtctaataccggaagttgctgttgttgcttcaactccccgatggctgtaaccgtctcaaaacgttgattgagtaatcggacgatttgctggtcaatatgattgatacgttggcgttcttgactaagtgtggttgggacatgtagcgcccatacagctaggccgacaaaggcgagaccactgacagcaataactaaatcaaagcgcatcgcggtcgcaatattttgctttgacagccacccagtcacgagcggaatcgtgaaggaagcaatactgccaaacgtgaaataaattcctgtgattcggcccttgatgtggggatagcctttgataaataaattgaggccgacctgcatcacgccacccgcagcagtaaacccaaacccgaaagccgccagcatggacagcccagccgctggactataacagataaccgctaacgccagcagcgagccgccattcattgccaacaacaatttggtttctgccaccccacgacgtaacaaccagaaaatcacaataacgccggtgattgacccaatgctgtaaagtgaaagcaaccagtgcgctaacactgacgaaaaatgcaacgtcgtagtggcaaacaagctgacccactgcgtgtagaggatcataagtgccatcgaagtatacccataaccagctaaaccaactgtcgccaaccagcgccggttcttaagtggttgctgggatacgcccgttccggcttgagcaacttgattttttagtggaaactgctgccggttcaacaggatactgttgaccactaggattgccgcggccaggataaatgaccagccataccagattctttgtgcttcaaagttggcaacgagcagtggtaataagaattcaccggcagacatgaaggcctttaataagacattggctgaaccttgccgcccacccatttcaataaacgtcgtgtaggttcccgcatccaacgcggagttcgcaataccggccaaaatcgccaaaccgtatgccagctgaatattagtgaccaatgccatccccacaaagaacgtgaagtagcaagccatgccaagattgacgaagactttacggccaaaacgatctgataaatttcccagaataaagtaggccagtaagcgcccaatgccaatcccagaaatgacataggaaaccgtcgctaacggggtctgccagtgttgacctaacgcttgcatattttgcgttaaaataattaagccaataccatgaataaagtagtttaagtaaagactgattgataattggtgctgacgcatgaataacaactccttcgtggaaataaaaaaagccggctagattgtgaaaatctagccggctcatcaaaatttaatcctaattgatgatattattccagctagactcacggtgtctagctggccaagatgaattgacttcgcttagacacgaacgtaggtgccgtccgtatctaaggttccaacacgggcgctacctaaaataagcaaagccataataataagttgcgttgaatgctaacgtcgtcataatcatctatcctttccgtttcattgattgtttatattaaaacattctcattttgattcgtcaaccctaatttcattttaattttgcaattaagaaatcattttcgcttgtaaaagcgccacgatgcgtaattcgcctcatcctactactatttacaaaaatcgtcttcagtacgactactcattaaaccaattgtttgcgacggtcgcgagcaggctaccttgattagtcagtctaccgacaacgttcaagcagtgtgtgaatgactagtgtgaccctacaatcagcaccatctaaaccgctgaacctcagtgattgacagcgaacggctccattcaatttgaacacaaaatagtcgctgacaatccatctggattcacaacgactatttttccagcgcctaatcttgacgctttaagttattaattaattcatcaatccggctaccgtattgaaccgagttgtcgcgttcaaaagttaattccggggttttatagatgctaagtcgtgagcctaattcactacgaattaatcccgtcgccttagtcaatccagccgccgtcttttcaccatcggatgccttatctgacaaaatactgtagtagatggtcgcttgttgaaggtcgccagttaccgttacaccggtaatggttacacccgcaacccgtggatcacgaacccgttttaacaaaatatcattaacttcgcgttcgatttcctgttccaaacgaccaactcgataatgttgtgccatctgctaatcccccttttaaaggttattcaactggaacttccttcatcacgtaagcttcaataacatcgttgactttaatatcgttgtaatcttcgattcgaagcccaagttcaaagccttgtttaacttccttaacgtcgtccttgaaacgccgtaagctagctaacttgccatcataaataacgacaccatcacgaatgacccgcacaccagaatcccggtggatgacaccatcagtgaccatcccaccaccaatcgtaccgatcttagaaaccttatagatttcacggatttcggcttgaccagtgatttcttctttataagttggttcgagcattcccttcatcgcgctctcgatttcatcgatcgcgttgtagataacttgatgcaagcgaatatcaacatcgtcagtatcggcttgggctttggcttgtggtgttggccgcacattgaacccgataataatcgcgttacttgcttccgccaaggccacgtcactttcgttgatcgccccaaccgctgtatggatgatattgacccgcacaccttcaacgtcgattttacgtaaactaccagctaaagcttcaacagaaccttgaacatcagccttaataatcacgtcaacttccttaagttcaccttgtttcattgaatcaaacaagttatccaaggtgacgtgagcagtttgcttccgttcttccatcaatgcctgcttagcacgttgttcaccagcatcacgggccgtcttttcatcatcaaagaccacgaagcgatcaccagcatccggcacatcattcaaaccagtgatttcaattggcgtcgatggcacggcttccttgatccgcttaccatggtcattggtcatcgtccggacttttccgtaagtattccccacaacaattggatcaccaacatgcatggtcccttgttgaacaagtaacgttgcggtagaaccttttccacggtcaagactagcttccaatacagatcccgcagcattttgcttagggttggccgttaattcaagcacttctgactgaagtaaaatcatatccaacaattcatctaggttcttaccgaacttcgctgaaatctgaacaaagattgtatcgccaccccaatcttcaggaatcagaccatattcagtcaattgttccatcacgtggttagggttggcacccggcttatcaatcttgttaacggcaacgatgattggtactttagcagccttagcatggttgatggcttcgattgtttgtggcatgaccccatcatcagcagcaacaactaacacggtgatgtcggtgatgtcagcaccacgcgcccgcatttcagtaaaggccgcatgtcctggcgtatccaggaatgtaataaccttaccatcatgcttaacttggtaagccccaatagcctgagtgatcccaccggcttcgccctctgtaacgtgagtatgccgcaattggtccaatagggtcgtcttcccatggtcaacgtgtcccatgaccgtaacaaccggtgcccgtggcgccaaattgtcggtattattaacttcatcatcaaagaacttgtccaaatcggtcacatcaacttggaccttttcttgcgcattgatcccgtaatcagtggctaagatttcaatcgtatctttatccaaggactgattttggttaactgcaacccctaacatgaataacttcttgataatttcagcaggttcacggtgcaataatttacccaaatcctgggcattcatgccgaccgtgtaaaccagtgtttctggcaacggcttgtccttacgaactggcgctggcttattattgacctggcggatccgttgattcttattgttccggctcttattgttccggttgttacgccgacggttattgttgttaccgccacgataacgaccaccaccgttattgttgctattcaaactaccaccaaagcggccgctgccattacgcgaactattattcgacccattgctccggttactgttgttcgtcgtagtccggttgttgttccggttctgaccaccattattgcttcgattaccagtattgttggtgcggttgttactcgtatttgagcgattgttattattagaccggttattattattattgttgttagaccggttcgtattgctcccaccgttattacgagcactgttgctccgtgaagcattggccgaacgattgccgttattactgttagtacggttaccgccgttattgcttcgattaccgttactattacgactttgactattattttggttattattacgattattattcaaagaatcaccactctgttgatgacgcgagttggattgctgctgattagcagttcgtgtcacattttttgctacggcttgcgtagcccgactcgttttagctggagccggttgagatttaggatgggtaactgtggtcgtgccttgtaactggcgcgcctcactgtcaccgagtgtcgacatatgatttttgacggagaatcccaactgctgtgcttgcgcaatcagctgtttacttgggacgttgagctccttcgctaactcataaattcgctttttccccatatcttcaccctcctttactgtgtcatgatcgccaccattttcttggcaaatccggcatcggtaattgcataaacagtgcgcttattaccagtagccgtatttaattctgctttagtaaaggtatcgatcactggaacatcataagattgggccttatcatgaaactttttggcagtcgtgggaccggcatcgctggcaataaagaccagtttagccgtctgattacgaattgcagccagggctagcccttcgcctgcaatttgcttgctggcacgccgtgaaaggcccagtaggtttaaacaagcttgcttaggcgtcatttccgaagagttcctttcgggcttgttgatgatcaacataagccactaactcatcgtaaaagtctgcacccactttgataccaaacgccttatcaaaagtcttttcttgcttggcacgttgtgcaacttgtacgtctaaggcaatgtaggcgccgcgtcccggctttttaccagtcggatcaacggacacttcatcctgcttattcttaacgacccggactaagtcttttttgggatgcatttcacccgtcacaatgtcctttcgtaacggcacttttctttttttcataatcccagacctcctttagttacttcactcacttagtgacgaacttattcagcgtcacttgctgattcatccacagcagtttctgaggcaggcgtcgccacggctgcgtcggacgttgctggttcctcatcttcgccggtatcggactgcactgccgcgtctgatgctgcttcagtcgtttccgtttcggcaactgcaacatcatcagggtttgcatccattatatcagaagcttcggtttccgatttaatatcgatcttgaacccggtcaatttagcagctaaacgagcattttgaccacgcttaccgattgccaatgataattgataatctggaacgaccacggtacaaccccgctcattttcaggatcaaaaataacatccaaaacttccgctgggttcaatgcattcgcgataaatacggcttgatcatccgtccattccacgatgtccatattttcgccgtgtaattcattgacaatcgtttgaacccgttgtcccttgggaccgacgcaggtaccgactggatcaacgttaggattgtttgaacgaacagcaactttcgcccgatcaccggcttcacgtgcaatcgaaacgatttcaacgatgccatcgaaaatttcaggaacttcttgttcaaacaaacgtttcaacaaatctggtgcagtccgcgaaacgaatacttgggggcccttcgttgcgttttcaactttcgagacgtaaaccttaattttgtcatgaatccgataaacttcaccaggtaactgatcagaacgacccatgaccgcttctactttgcccaaactaacgtagacaaatcggttatcttggcgctcaacttcaccagtgacgatttcattttcatactggctgtattcgtcataaataatgccacgttctgcttcacgaactcgttgcatgatgacttgcttagccgtctgcgctgcaattcggccgaagttcttcggtgttacttcaaatcgaatatcatcaccgatttcgtaggctcggttgatagccaatgcatcttgcaaactaacttctaaacgtgaatcaaagacgtcttcaaccacttctttaacggcataaacgtgaatattacccttaatttggtcaaagtcaacttcaacgttttgagcctggccataattacgcttataggctgaaacgagtgccgcttctaaggcttcgatgacaacttcttttttaatgcccttttctgattcgagggtgtctaaggcccctaataattccttgctcatgtgtagactcctttacttatttagaactttaccgctaagcgggcttgtgagatttgttctcggttgatcgtcaccgtcttgtgacgtgtcttatccaagtaatcgatggtcaaagtggtcggcgtcaccgctgtcaaatcaccttcaaaaattttcttgccatccaacttctggtataagccaacgtgcacgtacttaccaatagcattttgaaaatctgcttccttcttcaatgggcgttccgcaccaggagaagaaacttccaaaaagtaagcttggggaatgggatcaggctccatcgcatctagcttttcactaagttcatcactaaccattgcacattcttcaatattaatgccgcccggtttgtcaatgtataatcgcaaataccagctttgaccctcgcgaacaaattcaagatccacgagttcaaactggtgagcactgacaatggctgcggccactggccgaatggtttcaacaacattactactcaaggctgcgcctcctattcagattagtccaataaaaagagtgagcatcgctgctcactcgttaacgagttttaaattacaacccatatattagcacaattatgttgaaaccgcaagtttacgccatttatagcatttagccgttagctttcaagtcacagtaagcttccgcttcaacagcctgacaattgccggtgtatcaacattacaggccctaaatcagataaatctgtctgagtgctgttaaatgcatcaaccaccgcaaaaattcatcaaactttaacaattgtcgtgttttctagaacaacgagagttggttttcatctggcaaatcacttaacacaccattttcagtcataaagtcgatcaaactcttcgacacttttccacgcttagacaggtcttccttcgacaggaacggcttgtccgctcgggcagcaacgatttgcttggcaacgttcaaccctaaccccggaactgctcggaacggcgcaatcaacgtatcaccatcgatcagccaatccgaagcatcagatttgtcaaggtcgaccatggagaatttaaagccccgctccaacatttcgttggctaactctaaaacggtcagtaagtttttctccttggcgctagcatccatccctttgtcagtgatcgccttcatcgacgctttgacagcatctttaccatgggccatcgcaaccaggtcaaaatcgtcagcacggactgagaaataagccgtgtaataaatcaacgggaagtacactttaaagtaagccacccgcaacgccattaagatataggctgccgcatgggcccgcgggaacatatacttgatctttagacaagattcaatgtaccagtcgggaacgttggcatccttcattgcttgttgccattcatccgggatcccccgacccttccgcacgtgttccataatttggaaagacatatcagattccatgccgtagtgaatcaagtcggtcatgatgttatcacgacaaccaataacttcggccagcgtaaccgtgccatccttgatcaattcttcagcatttcctaaccacacgtcagtcccgtgtgaaagtcctgaaatctgaagtaattcgttaaacgtggatgggtgagtctcttcgagcatcccacggacaaaccgcgtcccaaattctggaattcccagcgtccccgttttcgagaaaatctggtcttctgtgactcctaaaacttcaggactggagaaaatcttcatgacgtgcggatcaactggtggaatactctcaggttggacacccgacaaatcttgtaacatccgaatcatcgtcggatcatcatgtcccagaatatcaattttcaaaatattatcatgaatcgaatggaaatcaaagtgggtcgtttgccaggccgcactctgatcatcagccggatactggacgggcgtgaaatcataaatatccatgtaatccggcacaacaataataccggccggatgttgcccagtcgtccgtttaacgccagtcgttccctttgctaatcggtcaacttccgccgaacgaagtgtttgattcgtatcccgttcatacgccttgacataaccataaccagtcttatcagcgaccgttccaattgtcccggctcggtacacatttttctcaccgaacaagactttggtgtaattatgggcaataggttggtagtccccagagaagttcagatcaatatctggcaccttgttcccataaaatcctaagaacgtttcgaagggaatgttttgcccatcacgcaccatgtcagtcccacattcagggcaatccttaggtggtaaatcatagcccgatccatactcgttattcgtataaaagtgcgagtactgacaatttggacaccgataatgcggtggcatcgggttcacttcagtaatcccagacagcgtcgctacgatactcgaaccgactgacccccgagacccaaccaagtaaccatctttattactcttaaacactaggcgttgggcaattaagtaaatgaccgagaacccgttaccgatgatactcttcagctctttatccacccgtttttggacgatttctggcaacggattaccgtaccacgcatgggcacggtccatcgtcagtttttcgatttccgcttcggcacccttcatccgcggagtatacaacttatccttgaccggtcgcacgatttcaaattggtcagcaagcgcgcggggcgtgtcaaccacgacctcatgtgccgtctccgtacctaagaaatcgaaatctttaagcatctcatccgttgagcgaaaatgcacgtctggccgttcagtccgatttaacgggttaccgggctgtgaatgaatcaaaatcttacgataaatcttatcctcaggattcagataatgcacatcccccgtagcagcaaccgggatattcatctcatggcctagttccaccatgttgctgataatttcttccaaatgatccgtatcagcaatcaaaccactctcgatcagcgccgaatatgccggtttcggttgtacttccaggaagtcatagtagccggccttttgtcgggcctcttccttccccttttgcatcattgcagtaaagacttcaccactagaacaagccgaaccgaccaggatgccatcccgatatttgtttaaaacactgcggggtacacggggcacgcggtaatagtactcaacattcgacaaggaaataattcggaagagatttttcaaccccgcttgggtttgcgcatacaatgtcgcatgaaatggccgggcatggcggtaagccgcattttcattcatatgatcattcagctgatcgtggaattgaacctgataacggtcctccgcatctttcaaaaacaggtggttcaaatgaccagtcgtctcagcatcatagatggcgcggtgatggtgctccaaattaacgttgaattttttggctagggtgtttaagcggtacccgcgtaaattcggatacagccaccgcgccagcgtcaacgtatcaataattggatttgtaatcggccccatgtgatgccgggcatagcccgtattcataaagccaatatcaaaggtgacgttatgaccgaccacgattgcatcaccataaaattcgcggaaaagtttaaacacttcttcttccgatttagagccccgcaccatatcatcggtgatactcgtcaaattagtggttgtttccgacaagtgaaaaccagggtcaataaattcctcaaactgatcaacgacgttccccttgaccatcttaaccgctgacaattcgatgacccggtcataaatggcggacaaccccgttgtttcagtatcaaaaataacgtaggtggactctttcaaatcaacgtgggcgtcattataagcaatcggcaccccgtcatcaaccatgttagcttcgacaccgtataaaattttgatattatttttttcaccagccgcaaacgcttctgggaacgcctgtgcccccgaatgatccgtaatcgcaatcgccggatggccccatttagcggcttgtttgacataatcactgacactgttggttgcatccatctgactcatattagaatgcaagtgcaattcaacccgcttctcatctgccggcgccgtgtcttgccgactggcatgcgacgtttcgttaatatcatacgcattgatcgttaaatcgcgcataaaactatcttcctgcacagaaccacgtacacgtacccacattccaggcttcagtgccgcgaattgtgcctcgtcatcagcattccgtgagaacttcttgacgaccattgacgaactatagtcggtcacctttagaatcaataactgccgctgggaacgcaacgtccgcacttccatatcgaagacatagccttccacgacgaccgaccgttcttcttcagtaatttggaccatctgtttagccggctcttgcgggttgatctgcttgcctaattggacaggaccatcaattggtgctggtgcatccgcctgcttttgccgtttctcattggcctttttgatagccgcttccgctttttgagccaacgcttgatcagacttcgctttttgttcatgaaattccttgatcttcgcctgtgaagcactctcatcaatcatcgtgtggacggagaacttcgggaagcccaagcgatgataggtactctcaatcggccctaatgcttggttagttagaaaattttgaataacttcattttcagccaacaaaataacccgaccatcttcataagtcggcacgttgctgttacacaatgattggaccaggggcgacttgatcccactgtgctgaacgatccattcccagtattcagctagttcacgaccattgacctcggtatcatcagtcacgatcgtaaaggtcacgcgtgcaatttctttaaaggcgatttggagtttgttttgaaaagtcataaattgtgtataaggtaaaacatgttggaaatgcaaatgaaattcccaaaccttggaagcttgatgaacggtcaatttatcgatcgctgcttctgtaaattcaggacccgttggcatttcaatttgttcgagtaacttctcgaacatttcttgttggtttaaactcaccagtggtcctccttttgttgattacaatcagttagtaagacacgcaccgtacttgttaatttgcgcttgcatatatattaaagcaaatccaatcttaaaatcaaaagctgctaaccgtgacccactagaaacagaatcccgtttcaacgatgacttagtcgctaacaactaacccaacgccaagcaagacttttaatattaactagaaccccaattaagtgctcagggccgcggtccacagttggcactactttgtcagtttgcttaaccgagaccgtgatgcctcggcgattaacggcatctgaaataatcttcagtgaacgcacaaatcgttcacttgaaacgttactattttatcacagtctgaccgttgagccacgtgattaatcggcaaacaaaaatcacccagtcaacggaatctaaccaggtgattgttgttggcgactatcaacgggtagttgccatatttttattaacttagttttgcagcattttaatcgatattcttgagcagaacggccaagttgttggcgatttcttcctgtttaacttccaaagtctcaccagtctggcgaagcttgatctcgacgattccttcgctggcctttttcccaatggtaatccgagcaggaatgcccattaagtcggaatcagcaaacttcacaccaggacgttccttccgatcatcatacaaaacgttgtacccagcggcttctaattgtgcttcaacttggtcggcaacctcaacctggtccgctttcttcgggttaaccggaatcacgtgcacatcaaatggtgcaattgcttttggccaaatcaacccattttcatcagcgcgttgttcagcgatggcagacaacaaccgtgagacaccaatcccatagcagcccataattaccggaatattacgtccattggcatccaagacttctgcgtgcaagtctttagaataacgggtgccaagtttgaaaatatgtccaatttcgatacccttggtgaacttcaagacgcccgcaccatctggtgataactcaccttcctgaacaaagcgaatgtcaacgtaagcttccgcgtggaaatcacgttcagggttgacgttcgtgaagtgatgaccgtcttcgttagccccgaccgtaatgttgaccatgtccttcacatactggtcagcgacaattttaacgtcatcatgaacgttaactgggccgagtgaaccaaagctagcgcccaaatattgttgggcttgttctggcgtagccatttccaaaaaatccgcaccaaggtaattcttcaacttaacatcgttgacttcatgatcgccacgaaccagtgccattactggctgatcgtctgcaataaacagaatactcttaaccagttggtcagcaccaacttttaagaactcagccagttcgtcgatcgtgcccactccgggagtatcgatcttttccatatcctttaacgaagcatgtgacttctttgggacgtataaactccgagccatttcaagattagccgcataatcactcgcatccgaataaacaattgtatcttcaccaaccggtgcgatggccgaatattcacgggaatcctttccacccatcgccccaccatcaccgatgattgaacgaaacttcaagccgacccgctcaaaaatattctgataagcttgcgccatatcttggaacgtgtcatctaatgaggcctcatccgcgtgaaatgaataggcatccttcatgatgaactcacgcccacgaagtaacccataacgtggccgatcttcatcacgatacttagcctggatttgatacaaagtcaatggcaaccgtttatacgatttgatttcatcgcgaacaattgacgtaaacgtttcttcgtgcgtggggccaaggataaattctcggtcatggcggttcttcagcttgaatagttctggaccgtatgtctcataacgcccagttgctttccacaactcagctggaatgactgctggtaccagcatttccgctgcatcaattttttccatttcttgccgaatgattttttcaatattcgtcaatacgcggtaagccaatggcaaataagcgtacattccggctgaaatttgtcggatatagcccgcccgtaacatcatttgatgactcaaggcttcggcatcattaggcacttccttgagtgttgggattaacaatttcgactgtttcatctacaaatcttctccttattgttccaaattaaatatcacttagaagaaatatcgctgaatatcattccaagttactagaatcattaataacatcaggaggccaaaaccaatcaaggtaatgacactttccgtttccacccgtagtggtttaccccgaatgccttcaacaatgtttaataatagtttaccaccatcaagtgctggaatcggtaataaattaacaattccaaggttgatcgacagcacggcgagcaaatatatcaccgtgcgcaccccggacttagcggcttgcgaggtcgtggcaaagattgccaccggcccacctaaatcgttcaaactgaacccgtgagtgaccatccgaccaagcacttgaaaaatttgtttggtaattccccacgaaccagtaaagccgtatgctaacttggcccccaggctcgtgtcggtcttagtcgcccattggaccccgatttgaccgattcgattaccagagaccgtcttggcagcaggggtaaccgcaatttttttagtctgaccggcccggttgatggtcaaagtcaaccgttgcttcgggctgtcttgaatcaacagcgaaatcgattgggcactcgtcatttttttaccgttaaccgccacgatttgatcgcccttttgaataccggccgtacgggcaactgagtctgctgtcgtcgccgctacgtgggtcgttgtactcgtaacaccaccctgcataaaggcaagaattgcaaatgtaatgatggccaaaatgaagttattcatcggtccggcaaaattcgtcaacattcgttgccataacttggccgattgaaattggacgtcgaccggtgcaatttgaacttcggtaccatcgctttcaacgatcgtagcgtcatgatcgacggcgtagtgtttaacttcactttcatccccgttctcataaccttcgatccagagttctttttcgagatcagtcgccgtcactgacagtggaattccattgaacaacgttgtcttcttactagcattgattgaatgaacaatcccatccggaccaatttgcaaactaactggcgttccgggcttgagttcttcatcttcatcatcggccaccccggccatccgtacgtaaccaccgattggcagaaaccgtaacgtataagttgttgcattacgacgaaacgcgaccgccttgggccccatcccgacagaaaattcacgcactagaatcccagcctttttggcaaagtaaaagtgcccaaattcatggacgatgaccaagattccgaaaacgataatgaacgtaataattgtaacgatcaattaagcgctcctttctcccgcgtttcgggtactcagcttaaaagaggccgaataaatgtgcaattggaaaaactaataacatactatcaaatcgatctaggataccgccatgtcccggcaagatcttaccagaatccttaacaccatagtaacgcttcaacgcggattctactaaatcgccaaactggccaactactgataagactaaagtaatcagtaccatactgatgacgctagcatagccgacgtgaaacccaattgcaaaggcactggcaacgatcacaccaatcacgctacccccaatacaaccttcccatgttttattggggctgatcggtgtgactttatgccgacccagtttgcgtccgaccatgtaagccccactatctgtcagccagacaatgaacatcaggaagagtaacatgtaaacactgacaccccgcgcagccgtgaagtagttgaagcccatcccgatgtacaggacgcctaacgtcaacattccggcatcatcaaatgaaaagcgattccgcgaccacacagtgtgtaacagtagcaagataactaagaagtaaaccacgtactccttgtttaattggtctggtaagccattgaaccagttattcggtgcaatttgaatcataactgcaagcatgcttacgattgcttcaaatgaaatcaataattttttacgcatcacgagtaactcgctcatcgcaacggcccctaacaacatggccacaatatctaaggttaccccgcccacaaaaatgactgggataaataaaattaacgcaacgacagccgtaatgactcgttgtctcataccaaaaactcccttttatttatgatccgacaacccaccaaagcgccgatcacggctctgaaaatccgcgatacaggcttgaagggtcgccgctgtgaaatccggccacttcacatcagtaaagaccagttcactgtaggcaatctgccacattaagaaatttgaaatgcgttcttcaccactcgtgcgaatcagcaaatctggatcattgtatggcgcaagtggtgccgtcatcagtgctgcgtcgatggttgcatcatcgatatcaccaaccgctaattgaccatcttgcacttgctgggcaattttttgcaccccggtcacgatttcggcccgtgaaccatagttgagagcaaagttcagcaccatcccatcacaatctttggtatctgcaatcgcattttggactgctttttgcgttgcttctggcaagtgatcaacgtagcccatgacttgcacccgcacattattttttatcaagtccggtacgaaagtatcaaagaaactcactggcagttgcatgaggtaattaacctcatcagttggccgcttccaattttcagttgaaaacgcgtaaagcgtcaggactttaacgcccaaatcacttgcggcaatcgtaatctttttgaccgtgttcataccttccttatggccagcaactcgtggtaaatgccgtgctttggcccaacgcccattgccatccataataatggcaacatgggctggaatacgttcaggatccaattgcacgtcggtgttatctgcaggatcattcttattaaaaaaagcgaacaaggcgcacctccataaaaatagcttaactatgcactattttaccaaaaaaagcactaattaactattcgtcaacaaaaaaaggcttgaatttctccaagccttaataaattggtcggtcattaaccttccaaaatttctttttctttgtccgcaacgatcgcgtcgacgtccttacccgcttgatccgttaacttttgggcttggtcttctaactgatgtaactggtcgtcagtgaattgaccatctttatggcccttcttcaaggcttccattgcatcacgacgcacgtttcgaacggcgaccttggcacgttcaccttccgccttaacgtccttggcaagttctttacgccgttcttccgttaattgcggaataactaaccgaatcgcagaaccgtcgttagctgggctaataccgaggtctgacgctaaaatagccttttcgatttctttaagggcactcttatcaaatggggtcaccattaagacccgtggttcgggtactgtaattgccgccatctgattaagtggtgtttgcgcaccgtaataatctgcagaaatccgattcaataatgatgcgttagcccggccagcccgaatattaccgagctcgcgttgtaaagcggcttccgccttcttcatccgttcctgtgcttcttttaaaattggttctgtaattgccatattatttccccctgactgttgtcccgatgtgttcaccggcgacgactttccgaatgtttccaggttcattcaagttaaagaccacgacaggaatgtcattatccatcgataaggaacttgccgtagtgtccatcacttgtaaccctttgttgataatgtcgagatgggtaagcgtatcaaatttaactgcactagcatccttgttaggatcagccgagtaaacaccatcgacgccatttttggccatcaaaatcgcatccgcgttaatttcagcggcccgtaatgcggcggtcgtatccgttgagaaatatggactcccggtaccaccggcaaaaataacgatccggcgtttttctagatggcgcattgccttccgccgaatgtatggttccgcgatttgtcgcatttcaatggatgtttgaacccgggtcggcacaccaattgattcgagattatcctggagtgccaaggcattcataatcgtggctaacatgccgatataatcagcttgggcccgttccatacccatctgggcaccagcttcgccacgccacatattgccaccgccaacgacgattgcaatttgtacgcccatgtcatagacgtccttaagttcctctgccaccgttttaatgacggggggattgattccaaagcccttctcaccagctaaggcttccccactcagttttaggattacacgcttatatttaacttccgacatcgttttgtcctcctcgaaattatctgtctatcattttaccatatatttcaataagcgtttggtatcagccgtaatccggcgcaaaaattaaccgaattctctttttaaagcggcttcaacccgttactttacaaaaagggactacgccgaaaattgctttccgtcgtaatccccaattagctaatcccttagtcagtaattagtctttaatttggttcataacttcatcgatgaagttatcagccttcttttcgattccttcgccaacttcaaaacgaatgaatgagctaaccttgccaccctttgattcgacaaagtgcgcaacagtttgatcagaatccttaacgaattcttggtcatccaagctaatttctgaaagccacttgtttaaacggccttcaaccatcttttcaacaatcttttcaggtttaccttcattcaaggcttccttaacaagcacgtctttttcatgagctaaccggtcagcaggaacttgttcacggttaacatattcaggattgatagcagcgacgtgcatggcaacgtccttagcagtagcactgtcagcaccgtctaagacaactaaggctgcaatttggccaccgttgtggatgtatgaaccaaaactttggtcagcacccttttcaacaacttggaaacgacgaagactgatcttttcaccagttacttgcgtcgtttcgatgacgtcatctttaaccgtcccgttagccgtcttcaaagctaaggcgtcgtcaacggaagctggttcttcttcagcgatctcgtcggcaacttcagttaccaagtttttgaacttgtcagttgaagcaactgaatcagtttcacagttgatttcaacaatggcagctttgttgtccttgattgcaacagcagcaatcccttcggcagcaacccggccactcttcttttcggccttagcaacccctttttcacgtaaaacgtcaacggctttttccatgtcgccttcagtttcaactaacgcctttttagcgtccatcataccaacaccggttttatcacgaagttctttaacttgtgctgcagaaatctttgccatagtttactctcctttgagtatcttgattttagataaaaagctgcccgcaaaatcaggccgtaatggtccgcgatttttaggcagcctaattatttcaattaattatttgtcagacttggcgtcgttgtcgccttcaacagcttcaacgatgtcttccaatgagtcaacggacttcttagcgtccttgttgtccttgaaagaatcttcagtaacatcttcgtcttcaccttgacgaccttcaatgacagcatcagccatcttagaagtgatcaaacgaacggcacggattgcgtcatcgtttgaaggaataataacgtcgatgtcatctggatcagtgttcgtatcaaccatcgcaacgatcggaatgttcaacttttgagcttccttaacggcgatttgttccttacgaggatcaacgatgaagattacatctggaatccgaggcatgtcttcgataccgcccaagaacttttcaagcttggcacgttgcttcattaataatgaaacttccttcttaggtaaccgttcgaaggtgccatcagcttccatcttcttcaagtctttaagacgcttgatccgtgtttggatagtgttccagttagtcaaagtcccacctaaccaacgatggttaacgtagtattgacctgcacgggttgcttcttcttcgattgaatcttgggcttgtttcttagtcccaacaaacaagataacaccatcatcagccgcagcatccttaacgaagttgtaagctgagtcgatcatcttgaccgtcttttgtaagtcaatgatgtagatgccgttccgttccgtaaagatgtatggtttcatctttgggttccaacgacgagtttggtgaccgaaatggacaccggcttcaagcaattgtttcatagaaataacagccataataaatgtgcctccaaaaaatttgttttattcctccccaccgttcaactaatcatggcactctcccgagcaccgccatgattatcgcagtaggtgtgaattggttttaacaccgaaaattagtataccgaaaattactagtgcttgcaagcaatttcatcaagaatttgtgaattcctgaaagtgtgttaaaatacaatctcgcatagggggctcacttaataatgataaaagccatcatttttgaccttgacgatacgttgtatgatcaaaaatcaccgttcactgctgccttaactaaaacttttaaccaggctttgagcagcactgaattggcacaaatttttaaccggttccatgattttaatgaccgtacctttaaccaggtcactgatacaactatgacgctggaagcgtggcaaaccgcccgtattcgacacgcgttagcacccagcaaagtccacatcagcactgatcgggctatccaatttgaaatggcctatcagcaggaactaaatcagatttgccttttcgatgggctgagtgcgacgctgactaaactcagtcacgcttttaaaattggtatcattaccaatgggccagcgccgattcagcatcaaaagttacatcaattacaaattgaacatttcgtgcatccggataacatttttatctcagaagaattgggtattgctaaacccgacccatcgatcttcacgacgtgggcccatcaggttggcatcaaggccaacgaagccgtttacgttggtgacaatgcagcactcgacatgaccagtgccaaacacgctgggtggcaaactttttggtttaatcaccggcgcaatgaccaggtgacaccgagcgtaattcctgatcaaatcatccagagtccagcggaactaaatgaactattgctagcacttcttcaagccgccagcgcttcatagacgcatactggcgttaaagctacgagcaacttatgctggtaacaaccacggtaagtacgtgctagcaagacctttacctagcaacacttaattgtgttatcgctaacaaaatcgctcacttgtgaagcccacagccgtgcaaccagctcgattgtgggctttttgttatggataataacagcattgaaagtacgcttggggttaacgcttcgaaaaggccccattagatgaaagtataaaaaatggcgtcactcagatgagtgacgccattttcagtgataatcgagattagtcaaacttaacttgtgtgtcagctttaccagtttcgatgaattgtttgttactgttcattgaaacgtgcaccatgttgtgaacggcagtttcagtgtagaaagccgtatgtggtgtaatcaaaacattgtcgcggttgaacaagttcatgaagaccttgtcatcaatcgtttgaccttcaaggtctttgttgaagattttagtttcgtattcatacgtatcaagagcggcaccggcaactttgccactgtctaaggctttgatcaagtcttctgaatcgatgagtgtcccacgagcaaagttcaagatgtaggcgccatctttcatcttgctgaaggcatccgcattcaacatgtggtagttatccttcaatgcaggaacgtgtaacgtgataacatcagcttgggcgtataattcgtccaaggtgtcaacgtacatgccttccttttcaagttcagcattccggtaaacatcgtaaccgataaccttagcgccgaagcctttgaaaatatcgatggcagcacggccaatccgaccagtaccgataacaccaacagtcatggtgtttaattccttggcaatatctggtgcccaacggaagtcttgcttagctaacttcttgttgaacaatggggtttgacgtaataattgcatcaattgcgttactgataattcagcaatcgcatttggtgagtatgcaggtacgttagaaatgtttaagccacgtgctttaacagtaggaacgtccaagttatcaacaccaacgttacgaagagagatgttcttaaccccttcgtcggctaacttgttcaatacttcagcagtatagtccttttgttggtatacatcggcaccgtcgaagcctttagctaagtcaacgttgtcttcagtaagtaattctggaactaatttaacttcaacatctgggttttctttcatccaagtatcgaagaatggacgttcgtcatcacgtacagcatatgcaataattttcattacaaaaattcctcctatatattgatacagtaaatattataacagtaaatgcgagaaatagaatcataaattgtgaaaacttcgctaaatttttacatcgtgagctgacaagtattttagcttggcagctcgcgattggtgtttgaaggcatattcagcctttaacgcacttgatttgtcagtgaaagtttcatgataaattaattgcaaaggccgccgtgatctgacccgcgtatatttagcccctttgcccgcattgtgcgttgctaatcgtcgctgcaagttatccgtaaaaccaccatacaacgtttgatcagcacataataggacataaaaataatattttttgattgccgtcgtggacgcagccggcttacttgtgcttgccatagagtaatgtgtgcacctcttccctgtattcaccatcatcacgataaacgacaagcggtggcatgattcgaacaccgttgcgtttcccatccttgatcatttcgatcagaaccatgttcgcttcccgttgtgctttgggatggacgaaccgaatccgtttgggtgccaaccgattggtcgccatggtactgaacaagtcatctagtcgttcaggacgatgaacaaaatatgctttaccattcatttttaacaaatcactagttaccgctaggatctgatctaaattagcggacagttcatgccgtgcaatcgccaaatgaggatttggatttttaacgctctgcggtcgatctttaaaatacggtgggttacataagactgtatccaccgaatctttcggtagttggcgcgtaattgccagtaagtcttcgttcaggactgtcatttgttgggttaaatcgttcaaaacaacactgcgttgagccatatcggccaaccggggctgaatctcgaccgccgtaatatggccttgagttttagcactggcgaatagacctactgcgccattgccagcacagagatccacgatctggctcttaacgcccttcgcaacctgggcaaagtcacccaacagaacagcatccagtgagaacgcaaagacttgagaactttgaatgatttggatatcttgactatataattgatcaatacgctcatcggcgtgtaacgtgacgtctgccatattcggccacctctccattaaaatcatcgcacagttatcatacaattaacttgcagaatttgccaaatttcgtcatactgtgagcagttagtaaacgaaaggaagatcgtgatgttttattcttttatgcgcggactagtccgactaatcatcaccattattaacggtcggccgcactatcaaggacgggaaaacttgcctgagggcgcctacatcttagttggaccgcaccggacgtggtttgatccgttgtactatgcgttggccggcagcccaatgaaatttagctttatggccaaggaagaactatttaagaatcccgtcttgcggttcattctcgtccatgcgaacgcttttcctgtcaatcggcaacatccaggaccttcagcaatcaagacccccgtcaaatttttgcgcagcggtaagctttcattaatcatgtttccatcgggaacgcgccactcacaagaacttaaaggcggtgcaaccgtcatcgctaagatggccggtgttccactagtcccaaccgtttaccaaggtccattgaccttcaaacaactttttagtcgtcagcgggtcaccgtccgttttggtaaaccgattgatattgatcgtaagctgaaactagatgatgctggtcaaaaacaaattgaaactaaaatgttgcacgcttttgacgacttggatcgtcaaatcgacccaacgttcaaatacgttgatcctgctacaacccgtcagaaacattaagttcgataataaaaaagtgtcggtgatcgcaatttaaagcgagccgacacttttttactacttgttatcgtttttagatgcagctttcatcgaattcaacatctgatgtaacttcttttcggatgggcgttgacccatttgcatcatcatactacgaagcatttcttcactaattggtggattttgcttcaagtaattttgcatatagtgccgggcaccgaagaaaccaccagttaacccaaccaatacgccgataacgacgattaaaatccaaattcctgtagacacagtcattcccctcccttattacagtcttcattaaactagtctacacaaattaataataaaagaaaaggaaaatttgtcagttgacaaattttcctgaaatcggttaatcatctcgaagaccgcgatcgcgttgcacttgacggaccttttctggcgtaacctctttaccatctttatcataaacctgaagcatttcaacttgttgccgaaaaccggcgcgaaattccttcaagtatttttgccgcaactcttgacgttcggcttcttctagctcggtgagcccctcggctttcgccttatgagctaactcattgatccgagcaagcaattcttttgaaatcaaatcagcagcccctttcactcttgaaatatacacgaaattagaccctaaatcaattaatagtgtttgtcaaccgaacatttgtttgaaagctatgaaacgctatgctacaattggtttaaccaataatgaaaataaaaaatgaggtgccaagatgagtaaaacatcggaaagcaaacaaatggccgttcttcgctttatttatgaacgtgtcaatgaaaaaggatacccgccaaccgttcgtgagattggtgaagccgttgacttatcttcgacttcgaccgttcacggccacatttcacggctagaaaaaaaaggttacatccaaaaagacccaactaagccacgtgccattgaggtaacgccagccggtttcgaagcactgggcgtcgaaactacgccacatcaaattccggtacttggaacggtaaccgccggccaaccaattcttgccgtacaggaagcgacggattattttccaattcctaaggaacttgaatcattcggtggcgaccttttcatgctcaccatccgtggcgaaagtatgatcaatatcggtatcatgaatggtgatcaagtcattgttcggcgtcaaagttccgctgacaatggtgatatcatcattgccatgaccgatgaaaatgaagcgacttgcaagcgattcttcaaagaggccgatcactaccgactacaacctgagaacgacacgatggccccaattatcttgaacaacgtctctgtattaggcaaagttgtcggtttatatcgcgacatgctgtttcagtaaactatcacccacaagatgacaattcaatttgtcatcttttttattcgccagtttttagagcaggttgatggcatgcctacagattccactcacaaatatttacacccttcccgccgtgccagggacgagagcacgttatttgcgacaaaagcacgcccccattccgaattcactttgccataatcccgcaatgcccaaccgattgccttctgaataaaaaagtcatcatcaccccgattcgttagtatcgccgtttgtaaattggcaattcgtcctctttcaagcctaatcgaagcgcgatacctactcgtcgcacctatttatcggtagctcgtaaatataccacccacttgttgtaaacaaccgtgcgctgagagatacgctgcaggcaccttgcgccaggcatcaacactatcccaccgtggcgttactgtgatttggtggtagcaccattgctattgaaccagcggcgcctgattctcccggtgtatcgacagaaaaagtgctggcgtcaaattggttattagtcagatctcttttcaaaatatttcaaatctgtgacgaacagccaatagttcaatggtataatgattatactattttaaacattgggagttggttacatgttgttcctagccattatgggcttgattgtttttctattagcattattttccgtgatttacgcacgtcaaaccggtggtggttggaaatttctaacactaattacggtcctcagcgccctggtcaccatctacgcggtcgttaaattgccttactggccatacaaccagtcacagcaatcgacgcgcaaagcatcatctagtacgagtactagcgctagtaccagcaagtctaaatcaacgagcttgagttcctcacaagtcgtttttaacgaagccaacaccaaacgcgcggccgcaacgactaagttgaatgaagaaaatatccttaaacaattacaatctaactatcaatcgattggcaccgttgcattcaccaagtcaacgaaaacatatacgattacgccaaccaataaaaagtacgttaaatctttgaagacgattaaatcatatccatctcaaaatcaaaaagcaatcacgacgattacttcaaatttcaaatcattgtcaaaatcgctcaagaaaaatcttgcggctggttataccattcagttgctacagccagataccactgacaagacgctgttgagtgtcaaagatggccagatcatcaccaacaacttcaaataacaaaagtcacttgcctagcatatttgctagtaacaagtgactttttcgtttaaacttgtcgatccaaatattggcgttgttcgtccttttgaccggtcaatacgaatcggtggggatcatcagcataactgaccgactgatcatcagcccgccattgcagttgatgactaaataaggtctcatattccaccacactaactcggcgccgacgagccaaccgttgtggtaagccatgatctaagccggcctgataatccggctgaataaccccggtataaaattcaccctcggcacccgagccataactgaataatccgagtcggttccctggttgtaactgaggatcagtcagtaactgcgataacaagctcaaatagagtgaaccagtatacaagttaccaacttgtcgatttagctgacgcgcatgttcgaagtgcgtcaaccactgggcttgtttctcggcatcaactaatggtaacacgcttcgaagcgctttaagtcccatctttgtatatggcaaatgaaaaactaaggccgtcagtgtgtctggactagtttgagtcgtttgcaagtaattcttaaacacatcttgaaaataatcaatatagatattagacgagtatttgccgtcaactagggcttctgtatgatacaatggtcgccaaaagtccatcacatcttcgctcagtagacttgactcagtacccagtgctaatactttaggatccgcactaattaacatagcaaccgccccaccaccttgagttggctcgcccggtgtgttcaatccgtagcgtgccacgtcactaccaatgaccagcgcctttttatctggatgaacacgcacgtgatcttgggccagttggacaccagccgtcgccgcatagcaggcttctttcatttcaattgttcgaacccgctggctcaaaccgagcaacttagcgacgtaaatcgcactcgctttggaattgtcgatccccgactcggtaccgacgactaataaatcaatagccgcaatgtcagtcgctgtcagcatcggtgcggcagcattagcagctaacgtcactgcatcctgactcggcggaatcaccgccattttagactgaccaataccaatcaaatacttatcaggttctgcctggcgagctgtcgccagttccgccatgtctacgtataaatgtgaagttgcaaaatgcaacttgtcgattccaactttcacgttttttcctccaatttgttaatgacaataagggattaatatgcacgtccgcgtggccctaagtaatgaaaatcagggtcagttccgacccgatagcagctgaaagcccgactaatttcattatgaaaagtcacaacaattgccggtgtcgcccaagtagacgccgcccaaaaaacggtgtcatcaaacgcccggttgtcattcgggtagcggtgatagccttgtacattgtcccaaatggtgccgtgcgtattcaaccaatcttcagcaagtccggcgtccacctgcatcatcacgtcttgattatcagcaatcaaactacttagtttttgccaatcgagttgccaatcatgaatatggggattcggtccgcgtgtgccaagcggcgtatgccccaatgcgatcggtgtcaattctacaaaatccatcttgaccaccccgttcgttaaccatcctaagatttcttaactattatagcatttcacgacaaaaatactgcccgcaattgcttgacctgggacgggttccataatttatgctgttattaaataaggcgattaagacaagcactaagtaaggagcgcggtaaatatgtggttctcacatcatcaaaaacgaaatagtcttcaggcacccgtcgccggtacttatacggtgattcccactgccacatcaccccaacaaatcgggctattagccatacaaccgaccagtccggtgattaatgccccgattgatggtgatatcattagcctgtcaccctcgcgtctcgttatcaattcgctgagcaatcaacatattgaactgcgtatcgaccggacgaacttccacaacaagtgtacctggcaagtacgcgtgggcgattccgtttcaccattaacaattgtagggacactttatggatccttaaaagacgtcaccattgctgtctatcgaattgataccattcaggccactaattgggtttcgctcgcaaataattagctgtttacggctatagattcatatccgctaattgggcatttcggttgtcaaaatataaatttgacggttgtgaatatttctaagtccaccttgacacccatcgcccaatctcaaaaagataaatcacaataatcacttttccaacagcttcaacgggccatgctactgtgcccagttggagttgtttttttgcaaactactcaacactgccaggtgtgaaatttgaaataacatgacgcatcgctgtcgacgtacttgattggtgatgtaattgacaagctatcgtgacatcattacaatttttgtggtttgatatttgattgctttataccttaattcaagctatgatattcatactggtttaaaattcctttctttattaatcagtaggagccctaattaatagatcaatctaaaaattataaaaaggtcggatacaattattatgaaaaccatgagtcttgttgttccatgctataacgaggaaccaacgattgaaatattttataacaccgttgaaaaagtcttggcagataatccagagtcgttcaaggatatcactactgaatatgttttcgttaatgatggctcatctgacgacactttgaacgtactacgaactttaaacgccgcccatcctgacactgtccactatgtctccttttcgcgaaattttggtaaggaggctggtttattagccggcctggagcacaccattggcgattacgtcgccgtcatggacgttgatctacaagatccaccgactttattgcctaaaatgctggcaatgcttcaaaccggtgactatgactgtatcggtacaatgcgggaaaatcgcgttggtgaaccaatgatccggtcattcttatcacgctcgttttactcagttgtcaacaaaatttcaaaagtacaaattattccaaacgcccgcgattaccggttaatgacacgtcagatggttgatgctattttggaattgcctgaatataaccgattttcaaaaggcatcttcaactgggtcggtttccgaacaacttatttgaagttcgaaaatcagccccgttccgctggcgagacacactggtcaatttggcaattattcaattattcaatggatgccatcgtcgacttctcagatgtacccctgaagattgcgaccttcaccggcggcttgctctcactaatctccattatcagtatatttgtcgttattattcgtaaaatattatttgataacagtgtcagtggttgggcctcaaccatcacgattatgctcttaatcggtggcattcagctgttctgtctggggattatcggcaattacattggtaagatttatatcgaatcaaaacaccggccccactacatcgtgcaggaaaagaagtaagaccaattttgggaacgatatgaccaattgaacacttctaacttgataaaatcttatatttttaatctgctttcaattttattattgtatagcagatttttttatttaaagatacgcatataacattgtgtaaacatggtgatacttgtaaaataacagttagtcttaatttattgtcaaataagttaattgcagcacgggcttattgaccctagttgccaattcgacgcggattaccgcttacaagttcgtgacaagattgattgcaatggtactgacaaccgagaacgcagtgtagcttaatcttactaaaaacacttttcttatactttaaagtcagaacatactttgccattgacccaaaccttttttatcaatgaaaaaaacacatcacctactttcgtaaaatgtcatgaattacagcattgtttgcttgatcctacggttgaaccattacatagatactagcatggtttccaatacaaaaattgaatcacgggctaatcgtggtgcattctatattatgttaaatcattaccccagtgaaaccggcattgaaccacaagatttcaatatcttgcattttgctaacagttacaatttagaatcaaaacatttattgtttattcgtaatgttgctgaacaagagcttggtattaaaattaaccaaggcgcattcatactttagtgactatgtatgataaatactagatttataagatatttactttgaaaataaaaatttggaggaagttactatgagtaaaaaatatgatgtttgtggaaacaaattaaaaatgtttaagtccgttcctgtgattgatggtaaagtctgccacgattgtatgaagaaaattggtgtggattacgttgagctaccgctttcaatgtctatagaagaaattttgactgttaaagaaattaaagacttacaagctaacaaccaaattattgatccacaaaagcgctgggcggagtataaaaataagttaaaacaagaaaaaatttaaaaaaagaagatatctctgctgaaaaagataaatacgatcaacttaaggctgccattaaagcagatgaacctgtcaaaaaaggtaaagtctatttagattttgttaaaaagcaaatcttcattgataaaactattcttgaagactatcgccttttcagattttcagatttaactagttacaagacaattaaaagccctaccactattaacaagaatcatagtttgtctcgttccatagtcggtggcttagttgctgggcctaccggtgctgtattaggtgctttttcaggaaacaagtcctatgacgcagtttcaaagatggcagtagttttatactttaataacaactactctaagcaattaaactacatatccactgaaacaaaaatcgacagcatgtactatcgagatgaacaagaaaaaatgcaacgattctgtgttcgattggataaaattttagtcgaaaatgaaaataatgaacctaccactctatctacacccactaacagtgccgatgagctacgtaaacttaaaagcctcctggacgatggcattctaaccgaagaagaattcgcagcaaaaaagaaacaaattctggggatctaatcactgtttattcataatgttgctgaacaagagcttggtattaaaattagccaaggtgcattcatcctttagttaactgtgtatgataaatactagatttataagatatttacttaggaaataaaactttggaggaatttaattatggctaaaaaatgtgatatatgcggaaagaaaatcggactcatggctagtcggcttgacataaaggatgggattatgtgtgtcgactgctcagaacaaattggattaaaaactggcctgcagtctatatccgtcgccaaagatttgactattgatgatgttaaaagctatcaagactcccatactaaaatagacatcgcaaagtatttagacgatatgaaaagcaaacctgctgagccttcacagaaagattctaacactaaaatcaaacacccttgtgcggtttgtaatcgtgaaataggtttattaggtggcttcaaattaactgatggaaaaatttgtgacgactgtgcttctcgagttggtttaaaaaataactttagctcacaatctgccgtcgaatatttaactgtccaagatatcaaaaattatcaagacactaatacccagatagatttaaagaaatatttagatgatatgaaaaacaaaccaaccgtatctgctcaccaggattctaatactaaaatcaaacacccctgtgcggtttgtaatcgtgaaataggtttattaggtggcttcaaattaactgatggaaaaatttgtgacgactgtgcttctcgagttggtttaaaaaataactttagctcacaatctgccgtcgaatatttaactgtccaagatatcaaaaattatcaagacactaatacccagatagatttaaagaaatatttagatgatatgaaaaacaaaccaaccgtatctgctcaccaggattctaatactaaaatcaaacacccctgtgcggtttgtggtcgtgaaataggtttattaggtggcttcaaattaactgatgggaaaatttgtgacgactgtgcttctcgagttggtttaaaaaataactttagctcacaatctgccgtcgaatatttaactgtccaagatatcaaaaattatcaagacactaatacccagatagatttaaagaaatatttagatgatatgaaaaacaaaccaaccgtatctgctcaccaggattctaatactaaaatcaaacacccctgtgcggtttgtggtcgtgaaataggtttattaggtggcttcaaattaactgatgggaaaatttgtgacgactgtgcttctcgagttggtttaaaaaataactttagctcacaatctgccgtcgaatatttaactgtccaagatatcaaaaattatcaagatactaatacccagatagatttaaagaaatatttagatgatatgaaaaacaaaccaaccgtatctgctcaccaagattctaatactaaaatcaaacacccctgtgcggtttgtggtcgtgaaataggtttattaggtggcttcaaattaactgatgggaaaatttgtgacgactgtgcttctcgagttggtttaaaaaataactttagctcacaatccgctgtcaaatatttaactgtccaagatatcaaaaatcatcaagactctcatactcagatagatgccaaacaattgctttttgacaataaatcagaatatgaaaaattactgattactttcaaaaaagaaggtaacggtcatatcggaaaagtttatctcagtgacaaacgcaaacaatttttaattaagctaagtttcatggaaaacttagctgatgaaccattccaactatatgactacagtgacttagaaggatatgatcctattgaaaatgggactactattgaagataaacatggactatctcgagcaatagctggcggtttaattgctggtccaactggtgctgtattaggcgcattttctggtaataaatcgtatgctgccgtttctaaagtctctgtcgtgctttatttcaaaggcgaccatcgcgtggaagcagtcttacttaacgaaactactaaaacagatagcagtgcctaccatatcactcaacaagaattacttagattctgccatgatcttgatacaattattgccaacaacaatagcaacgttaatgaacctgcaactccagtctctgctactgacagtgccgatcaactacgcaaactcaagggacttcttgatgatggtatcttaactgaagaagaattcacagcaaaaaagaaacaaattcttgggatttaattaagggggaaataacatgtggttactactattaatcttgctcatagtcggggcatttaaacttatgggtaaggctgcaccctacgttgttctcgcagcagtcctgacttatctctactaccttgttaaaggtatcttctcattcatctggcgagttgtatctagtacgccagggataatcaccattattactattgcgttaatagtaattgtttatttcattgtaaaagctaatagatgtgacgtctgcaataacaagtacaaaagtgatgagttagtgcacattcaaaatggtaaagtctgtactgattgcttacagaaaattggtgttgactacactgccctcccgaaggatgtactagttgaaaagacacttactgtgcaagagattgaagacttacgagatagcaatactatcattgatccaattcaacgttgggaaaattatcaagaacagcggaaggccaaagaacaagcagctaactcagccaatattgtccccactaacatcggctcaagtgaagttgatgagttgcacgaattgaaacagctgcttgatgacggcgtgattacccaagacgactttgatgctaagaagagacagattttaggactgtgaattatttggccgaatcagattggagactgttctaatggatattaaatttatttccactataattataacaatataacccaccgcatttgcaatcatcagatatatatacctatacgcattgtgctagttaattaaccaagactttagttgtgaaaaaatgcctaaccaagctacacttcaagcagcgcaaacaaaggagtgtgtcttatgttagaccaattttatcataaccaatttgtgattagtccgcgagcaaattcaaaaccgccgtaacgtcaatcaaggcaagctttcagacgtcttattgttatcattactttgttgacaagttgatttaaaaatgaccgtccgaactaggttctatgaagtgacccccataaattggagtaaatttctaagctgctaattggctggtatattcccgatattttaccggggacataccgaccaattttgttttgatacgacgctgattgtaataatctacgtagtttataatggcggattctagctcttcatagttcttgtattgataattgtgaaccgtgccaactttaagaatgtgaaagatactttcagctaccgcattatctaggcatgtggccttgcggctcatgctttggaaaacgcgagcttgtcgcaaaatattcacgtaccgacagttctgatactgaacccctgatccgaatgaattatcatacggtatggtaagcctgaacgtcttgccactaatcgttcaagggggtgtgtgacgaaggctaccgttggtttacgtccaatggcctattcaataatttctccgttataaaggtcaatataaactgtaaagtatgcacgtttgttgattgtttgattcccccaacggacctccgttacatcagtaacgattttttgaaatgggcgatccattttaaaacgacggtttaaacggttatgagcaactgtaccaacagttcctttataagagttatatttcttcgttcgacgattgaatgcctgacaaaggagattattttcacgcataatacgaagtactgccttgtgattaacgttgattcccttatttttaagcgctaaagtcacggttcggtaaccgtaatcgggattggccaaacgaacgcttttaatctcatcaactaacgttgatgagcctgattgatatttacagtgaaatgcatcgtggtaattactactcgacatgtgtgctgcttttaaaaccacaactaatttaacattgaatttacgtcttagctcagtgattagctgggctttttcttggtttgagattttttctgtgccaaggcttcgagtttttccaagtatgctacccggattcgtaaaagctcgttttctccctgaagttgtttcaatgtcttagattgtttagatttatctgtcatttttaaagaccgtcctttagatggcttaagatgtccctcaatcagtcttcgttcccagtcccaaaccatcatcggttgcttcaacctgaaatgggttgccgttactggatatgaggcatgatgtttttgtcgccatttaataaccttgattttaaaggaatagtcataaaatgtcttcctacgacaattctctaatccttgaatgccaaaaatttcaaattgagcgagccactgataaatcgtcgcacttcctttgatatcataatttttcataagtaacaggggcgaagttccctggagatatctgcttaaagctcgttgctttattttagctgaaccatagtaaaaccccctgagtctggatttactccactcagagggttcactttactaccggtttttaaaacgaaatatttttaaacccggataattgccagaacgatcacgctttaatcgtaagtgttattatgctgccaatgaacttcaatggatttgctttggggtattacgtaatttatgtccaacaccagcttacacgattattgatagtttaccgatgcccttatgttagggtattagaaatcatcgtgctaaagtctttcgcgaaaccgccaatatcgattataacgcaactaagaaactttattattacagcttcaaaggtaacctcgaggtcgctaataatggcattgttttaacttacgatgtgacccccgcttcctggcatgctattaaatcagtacaaacattattatcgttatggcctagccatcaaatattggtagatttaggttatcttagtcgtaagctcaaacaagaacttgccaaaaagaagattaatttatggacgccggttcgtcgaaacatgaagcagcccgtggcttaccaacgattactaaatcgacaacggcgccagagtgagacaaatttttcacaactaaatgagttatttgatattgaatgaatccgcgtaagatcattgacggccttacagttacgattagagcaatatttacttgttcatacaatgatcaagctaggaatcaactaacacaacgcgtgaactattattgttattaataaggaaaagacggttcgaccgttcgctgatctaggcactgctgacagtcagttattagttcatattaggagtagccagttcaaaaaaatagttgctcttttattttatataaaaactatcttcccaccaaaaagaagacgaccttaacctaataacgtattaaatttttaccattttattgaagaaaggtgatgacaacaagtccttcaaattctacccgcctaggtgaaatttaaggaggaaatataaatggcaagtattaataagaaaaatggtaaatggcaagtacgagtaagttactatgatgagttcggcaaacgtcactttaagaataagaatggttttagccgtaaagttgaagctgaagcgtgggccaatagtttagagttagacaaatttaataactccatcggtttagtagatacaactaccaccttctacgcctattactcacactggcttgaaacctataagtttggcaaattggctcagattaccgaacaggaatatcgttacactttgcgtcaaattagagaattacttggcaacattaaactcaactcaatgactcgaacccggtatcaacagttcttgaatgacttcacccatggcaatgtcgaacaacgcgccaaacgtcatttaacaggtgaccaaccttatcatagtaaagcatccgttcaaaaacttcacgggcacattcatgcagcagtgattgatgccgttgctgacggattaataaaatccgatttctgtactcatgctgaactgggtggtcataaaggtaaggatgctcaactcaaatttctagacgtcaaggatatgaaaatacttgctaatgaggtaaacaagaacatccgtttaacctccactggcaagtcgatgatatataccggcttaatgactggtatgcgtgtcgctgaagtgtccgctctaacatggtcggatattgactggaaaaccaagaccattcgtattaacaagtcctgggactatgtgtatgggcagaagttcaaacggactaaaactgagtccagtattcgtaaaatttctgtgaccgatgagttgttaaatcatttaaaacagctccgatcattacagattcaaaagaatctggataaccccgatcacatggtattcttaaataatcgtggtcgtattccaactcctggggcttgtgatttattgctaaagaactatcataccactcttgaaattaaacggattagcttccacggtctacgtcacacacatgcgagttccctgctttattgtggtgtcaaaatggagtatatttcaaaacgcttgggtcacaagaatagttcaatcacgcgtaatgtgtacgcccatctgctcactgaagatcaaaaacaggaagaatcacggactttaaatgcactggctaaatttagttaatgtgcattatgaagattgctgtatccgttgggacacaaggggcccagcaattaaaaaatcaccactgtggtgcactcaaagcatcccaaaaacagggtaaaaatcattagagtgcaccgacaagtgcaccaatatatcaatccagagcgttcctaagcgttttgaagcaaacaaaaaccccgctatctcaacgattttcggggtcaaagaaagttgttccttaatgatttaaggagagtacaggatttgaacctgcgcgccggtattagccggttcgccggatttcgagtccggtgcattaccactctgccaactctccatgtggtacttaataagtatagcataattagctttcagaacaaatatttattcagaattttccacaaaaaatatccgtcagcccttgccaacggatacccaattacttctgttcacgtgcggcttgaccaaaaacaaagaacgaaccaagaatacccacgcatgatagtaaaaataaaatgccatagcacagtacatcccccactgtcactaaagtcttcggaaaaccggcagttgagacccatagaaaaatcacgcttaaccaaaaccaaaatgaacgataaaaccgaaccggtcgacgtatccgcatgacgctcccccctaactcgttattccaatgaaataaccgattggaataacgcctattataggcagtgcgcaattaagtacaagctctgaatactcaaatccaacgtttaagctacaattcgtaaccgattacgtttgttaagtgccaatccgattaatatgcccccttgcaacctcaatcacaacgagccagtttacgagcgataatcataaatcggtcttcaaacgtcgtgacgcgaccattaatggtcagtaaggattgtaactgatgtaatttgggaagcatccgtgccacgtcaaaattcggaaactcccatggaatcaccgtggcataatagacaattgcgccaatatccgtaaaactcagtgccgcgtaggcttgctcagcccgcagaatttcaaatcccgcagcctgcatttgagccattaccgtcaacaactgattgtcaggatacgccggttcgtaatgctcgtcaaagaatcgtgacaacgcataattattggtcgcaccaacttgctgagtcgcaaatcggccccccggctttaaaacttccgcaattcgcttcactggcatcgcaccatgactattcgttacaatatcaaatgtcgaatttggtacggccgtcaactgttcggcggcatctggatataatgttatcccctttttaaccaccgtttgcttcaacaactcaatatttggttgccacccctcagtcaccgcagtcagcgctggctgatggttaaaacgccccatcaattcaccaccgcccgtatcaatatccaaccatcgatcatcggcacttagatgctcacgaactagggcagcgtaatcccacggtaagtccgcagtctgccaccggccagccagatgactaaagtcccagccgtgcatggattgctgcgcttcttcaaaccaacttctttctaaagctgtcatattttgcctccttcgtttcctgtaaaccagaccactcatcaaagtctccgctggcctatttcaatacgaattatgctatgattacaatatctttaaaaggaggttcagtcaatgacacaattactggtcacgaccactgaaaatattccggggcacccctatgaagttatcggtgaagtctttgggttaaccactcaatctaagaatctggtccgtaacattggggcaggcttaaagggcctagttggcggcgaaatcaaggattacaccaagatgctcgaagagtcgcgcgatgtcgcggtcaatcggttgcgcgataatgcaagtgccatgggtgcggatgccgttgtgatgatgcggttcgacaccggctccattagtcaggatatgcaatcggttgccgcatatggtaccgcagttcgttttatcaccgaagatttgaccactgacaatgcttaatctgattcgagactaacgaaaccgcctgccggtaatctgggcaagcggttttttagcatggtggcagctgtttgtataacacaattataattttcgtcaccggcgaatgaacagacaaccaccacaagctaacagtaatcccatggccgtcaaataagccgcttctgggctcacgatattatccaacaagaccaatccaacactgccgattggaatcgaaatcgtcgccaatgaatttatgatgccgcctaagctcccaacgatactttgatcggccactttcaataaactcgccatcaatttaggatttgcttgtcccatacaaaatcccccaatcatcatgattgtaaccactacccaatagttttgccaaaacaacagattaataaataaaccctcaaacgccacgacggtagttaacatgacaccacgaaacgtccacctctgaaagtaacctgtatgtaacaaattccctgcaaccgagccaaatacgtcagcagtattcatcacaagaattgcgactccgaatgaaaatggtaactgcgtcgcccggtgaatcaggtataaattcaatagtgcatcgacgcttgcacccaccgcattcaagaacaagacgctccccaatagcgccaagacgttcatgtgcacccccgcttccattgcttgtcgtacttgtcgtagcagttgacgaaatgtcgacgtcacggtgacagttgcggaaggtaattttagcgtttcatacccagacagcagcaccagaccggcaatcaagaacgtgattgcattcaaatatcccgcgagacgataatcgcccgttgcggccaatagactgacacccaacgcttggcccatcgtctgcattaacactccgatgccttggttgatccctaaggcctcttcttgtaactcagacgcgactttagcttgtaataatggcattcggaggctgccactcaacatccccaacacgtctgagcacaaattgatgacaataataatcaacagcaacccgacctgtttttcagtaataagttgcgctaacacgagatataatgccgcttgaacaaatttcaaacctgctaaccacccccgcttattggtttgcgagtctgccaatcgaccagtaagcataccaaaaataccaggaagcacagtagccaccgaaactagtgaaaccatcaaatttgcttgtgcaaacgttcgcgcgtacgttaatagaataatgttaaataggctggtaccaattgtctcaaaaagatcagctactgttaacgtgacaaacgctcgattacggcctagatttttcataacgccacttccaatttaatattatttatcgtttaaataaatttaaatgataaagcaactttaatcgtttgatttctatttgtcaaatggttaagctagtattgaggtgaaaaacatgcccaaaaacacactggctcagtttgcaaagttaatggccgatcccaaggtggccgctatcttaaaggccaccaaatctaaaactggtttaacaactaagcaaatttcggcccaaactaaaattcccaacaatcagttgtactacaccatcaacaaaatgcaggatgccgacttattaaccatcgttaatcaagttcaggttaaaaatctaactgaaaacttctattccagtgcccacctctcccatgagacgccacaggaattggcagatcttgatggtctcgatactgatctgactgacatctccggcacgtggactcaagcccatgtccaacaagttttacaatggatcatgctattgaaccacgactttaccgaagcctaccaggaagagatgacccgcaagcaacctgacaagtcagccatttttttcagtaacgcgatcctaaacctttcagcggcaggcgagcaccagttgcgcttagatttgatcaaattgcttggcgatgctgaaaagaatgatcctgatcctcagtcaacggacaagcgtcaggttaaactactcattgaaaagtggcaataattagaatatgcaattgttagtctttttggcttggctaccaaagaatcactgactatccaagctaactaacgaccaaaacaagggttagcaaaaaagctccgaatgactaataaatcgtcattcggagcttttaatattggctttaaaattgcatcaagctcaacatatcataatctttaatcttatcgcggccgtgcaactctttgagttcgaccaagaaagccgtcccaaccacgttaccgcctaattcttcaaccatttgaatcgttgctgagatggtcccaccagttgctaataaatcatcagtaactagcacattttgtcccggcttaattgcatctttatgcaaataaagtgcagactgcccgtattccaaatcataagtcgctttgaccgtttcgcgtggtaacttacccttcttacgagcaggtgcaaaaccaacgcctaattcataggccactggacaacccacgataaagccgcgtgcttcaggcccgacaatcatatcaacatgtttatcacgcgcaaattgcacgatctgatcagtcgcttcacggtaagcttccccgtcagccatcagtggtgaaatatcgcgaaaaatgattccaggttcgggatagtccggaatactagccacatacttttttaaatctaatgccatttgttcttaacagctccttcaattcttaaccgcagcctggttcttcacccatacttggagcgctgcagatttactatataaaagcgtttcttcagcaacgatttgttgttcgcgcagctgataactaggggcgtgatgtaaatccgcttttgccggattcgaaacgccattcatgacaccatcatttattttaacaaatccgacctcaaaaaacacctgaatcatgaaaataagcaaatttcgttcaatatgcagatgcttggccactaatgttaattgatgatgaatatcaacatcatggtgcgctgcggtaaactggaaaagtttcgcaaactgcgcgcgatttggcattcccgttaaataaaccgattcttgccgatataagtagagcgtcagctgatcgagcgcaattgtgctgagtacctgggtcatatccgccagcgtgtcaggacaatcgacaatgaagaccgcttgattagccgtcacggcagtcagatccgttttcgtatcccccacccatacggcttgcgtttgggaacctaaatactgttcaacttttttcaacagacgctggtggaaaaagaggtaaacccccggtgcttgaaacaaatgggccgaaagatgttgcgtccgggcgtcgatcacctgggtccccgtcactgcaatatccttaaccatgatttggggctttgtctgaccgttccaagtattttcactcaactcacccactaacgtcacatcggtgggactcgcctgaatagccggcaaggcagtacccatcgaaaaaccgatagcatcaatcgtattggtgccatcacccagttgtaatttcaagtgttgctgatcactaccaatcgcgcgtgcttgcggaacagtcgttggaactaattcaaacaacggtgccgggttatccgttccaaagggggccaacgcttgaatatctgccagagttgccaaggttgcctcagctaatggtaacgtgccgtcaattggtaaactgacttgcgcattgtctgctaattgctgacccgccgccgcttccatcgcctctttaagcgttgctaactggtcggccatgacagttagtccaaccgccatatgatgaccgccaaaagccaccaatgactcccgaactgggtcgatcgcggcaaataaattatacgcttcgacgctccgaccactacctttgagccggccatcatcatcctcatttaacactagggttggtttgccagacgtttcgaccacgtggctcgcgacgattcccaaaacaccctcgtgccaaccatgcccggtaataactaaggtttggcgggcctcattttccggcgtctgtgcttgctcgattgcactggcactgattgtcttgaccaagccttggcgtttttcattcaattgattgacctgcttggccagcgcggtcgcccgctcatcgtccaaagttgtcaataattctacaccgctctgcgccgactgcagacggccaagtgcgtttagccgaggggcaataccaaacccgatattggtctcggtcaatttatcgggaatcaatccggcttcttgaatcagtgcggccaagcctgggcgggtcgtctgctgtaagaccttcaggccgagcgttaccaaagtccgattttcaccagttaagctgaccaaatcagcaaccgttccaatagcagccagatctaacagttcctcgggtacttcctcaagcagcgccgttgctactttaaacgccacaccggcaccagaaagaccaccaaatggataactgccctctggatgtcgtggatggacaatggcgtaagcgtgcggcaattcagtcggtaactcatgatgatcggtcaccacgacatcgatgccctgttcctgcacttgattgatgaccgcatttcccgcgacaccgttgtccaccgtcacaaacagcttcgttccagccgcaatcagccggtcaaaagcggcctgattaggaccataaccatccttgaaacgatctggaatatagtaattcacgttagcgccaatttggtccaacgtttcatacataattgacgtacttgttaaaccatctgcatcataatcaccgtaaatggtaatttgatccccggcaataatcgcctcttgaatgcggtcaacggctttttccatatcgtgcatgttcgttgggtccaacaatggttgttgatccgcgtgcaggaatggggcggcttcttccgccgtattaatgccccgcattattaataaccgggcaactaaaggggtcacgctggccgcctcagctaacttatcaacatcggcttcatcaacggccgttgttaaacgtggcacccactttttctttgccgctaacatggcatccttcctttcaacaacttacttatccgctggcgtggttggttgttctgccaccgctcgtttttgtttacctttattattcaaacgcaacgttaattgcttattttcggcagtcaacttatcaatcttagcctgggccgctgctaaagcttcactatgggctgtccgttccttagattcattgaccgtcgccatcagtactgcggtaatgacacctaagatcaacgtcaccacaatgaccaaaatcagtggccaatgaactgctgtaattccaaaattgattcgaactggttctacgtttaaaattgcaaaaataatcactactagtgcaatgactagtgcactcactaaccgccattgattcttcattaaattcatcccctatttaaaattaaaaaccgtccccgtcagccaatccccgagcttgggtgccagctgataacctaaattagctgcagacatcacccaaggccgattcagttcgcgccgttgatgcccgagtttgcttacaatcaattcagcaaacttaacggggttcaatgccagctggtcgacccggtctaaatagtgccccgtgggatccgcaattttgaaaaagtccgttttaatgggacccggattgaccgtcaatacgttgacatgagcatccttgagttctaagcgcaacgcattatcataagcaataatggccgccttactagccgcataaacggctgatttaggtgttgcgattttgccagccatcgaggcgatgttgacaatttcacctgcatgttgcttgaccatccgttgcgcagccagttggctaacatacatggttcccaatgtattgacgcgcaacattttcgccatcaccggcgcatccatggtgatcaccgtggtcatatcgccaaaaccggcagcgttaatgaccacatccaattgaccaaatagctcatcgatggtcgtaaagacgtgatcaacgtccgccacgtgacccacgtcacaagtaatcgccacggcctgcccttttgataacagacgacattgatcagcaacctgtgttagccgttctcgccgccgggctgctaagacgacattggctccctgactcgccacggctagggctagttgctcgcctagtccactagacgcgccagtaaccaaaacagttttacccactaagttcgtcatttacttgacctaacctttctcaggtaatggaatatcaattacatcaaagtcgcgaacgactttcgagtgactaaagactttctgtgcttgtttttgtagttccttactcaacttacccgtgtaccgagccgagatatgggtcaacaatagctgcttaacaccggcctgttgggccacctgggctgcttgggtactcgttgaatggtaatagttatgtgccaacttaccttcatcttttccgaacgtgctctcatgaactaaagcatccgcatcctgtgccaagctgaccgcgtgcggtgtccgccgagtgtcaccgagaatcgtcaccgttcgacccttttgtggcgcagcgatgtaatcttgaccattaattgtccgaccatcaggcaacgtcaccgttttgccggcttttaattgaccatagacgggaccactcggaatgttcagggctttgagtcgatcggcttgtaattcacccgggtggtccgcttcttctacccggtaaccaaaacaagcaatccgatgatccagaggttcgcagcttactttgaacgtcgcatcttcaaaaactgtctcagccttcgtgatttcatgaaacttcaatgaatatgacaaatgggtgccagagacccgcaacgccgtttgaacgaagtcgcggacaccgactggcccataaatggtgagtggttcgtccccgccttgaaaagaacgcgaactcaataaccccggcaagccaaagatatggtcgccatgcagatgggtaataaatatttttgcaattttgcgtggttttaacgtcgtgcgtaaaatctggtgttgcgtcccttcgccgacatcgaacaaccagacttcatttcgctcatctaatagtcgtaatgctgtgctagtgacatttcgaaatttgcccggtgagccggcaccggtacctaaaaattctaattgcatatttttgttcgtcctatctatacagtctgctaactattttaccgaatctagcggcaatacacaattgttagcactgcaaagtcatggccggtcaacaccgtgcgctcaccgaccgcaattctaaaaagcaagcgacgttgggcgactcctcacaattaacaggaagaacacgaacaacgctgctcattttattttaacatgtcaggctaaaattatcgcacttggtttcaagattccacgcgccaagactgcctgccaccggtgttatctataatcaaaaaatgcacttttccgggcaaactgactatgacgggttgtgaccgttttcattcaacccgtcatcgccggcaaatgaatcctcagtccatcttgcttaacccaattgattatcgtatacttgcttacaaatcgtctgaacaagaggtaaccgttatgcgactcatcgactttaacttatcaaccgctgatctacagcaaactttaccactgtattgggaactaacgactaatcaaatctggccaatccaaagtgttacgctcgtcgatcaccagctggttttagtagcttcaaaaagcgcgctcccgctgacactcgaccagttcaatgcgcggacgcgccaaatcgatggtcaaacgcagctctgtattcaaaccccaccgcgcccgcgccgattatttggctatcgcttaagccagcagcgcttactgtttggctgagcatctaatcgcacgtcaactcaaaaacagcgtcgttagttaaaattctaacggcgctgtttttggattgttcattattttatcactagtctacctaccagactgtcgtaacgacaatcatcaactaattacgtcgtcacaaaagtttagtccataaactggaaggagtagtccaagatttgaatcgtatcatcattcttggcaccagctgcacgtaaggcatcatcaacacccatcccacgtaattgccgagcaaagcgcattaaactttcttcatgatctaaattggtcatcttaaagagccgttctagcttatcaccagacaagacgaacaagcccggttctggattatcaatgctaaagtctgcatccgcttcagtcgtgtaatcacggtgcttcaagtcgtcaacacccttgattgggaattgtggcgtcgtatccaataaatcagccgtcttggctaacaaggcttttagtccctgttgtgtaatcgacgataccggatagacggctggcgtgtttggcaacgtatcatccgtcgctaacttcgccttaaagtcttccagattagcttcggcatccggcatatccatcttagtcgccaccacgatttggggccgcttcaagaggtcaggatcataactcgtcagctcgtgattaattttgtgataatcctcaaacggatcgttttcttctacaccactcatatcaatcagatgtaaaataacgcgcgtccgttcaatatgccgcaagaattgaatccctaagccgaccccgttagccgcaccttcaatcaaaccaggtaaatcagccatgacaaagtcacgaccgtcatccaaacgaaccatcccgagattaggcactaaagttgtgaagtgataggccgcaatcttgggcttagcactcgtgaccactgaaagcagtgtcgacttgccaactgaaggaaaaccaaccagaccaacatcggccaagactttcaattccattcgaatcgttaattcatcgccgggctcaccattttcagcaatttcaggagcagggttcttagcgctagcaaaatgaatatttccccgaccgccccggccacccttggcaaccactaaccgctgatctttattgacgatatcgccaattaactcaccagtttcagcatccgtcaccgttgtcccaagcggtactttaataattgtgtccttcgcggaacgacctgtcatctgcttaatcattccattgccaccagctgcagccttgaacttccgcgtataacgaaaatccatcagtgtccgtaatccttcgtcagcctgcaatacgacgcttccgccgcgaccaccatcaccgccagcgggaccaccattgggaacaaacttttcacggcggaaagcaaccatgccgttaccaccgttaccggcctttacatctacttttacttgatcaacaaacatgttcttttctcccgtttcttctatattattatctacgaaatccgatcgtgcgaaattagatacctgacctagtatacaaatcttcggccacttcgtcaaaagttccacgcctaattagacagatcatctttatttggatgctaatgacgattcgatgacagattttggattattttgacggtttttgaaggtttttgttgcattttgacgtttaaacaggtatattattatgcggagggatttgaaagtgcttacagaagaacgtcaacagtacattttaaatacgatccgtttcaagggcattattaaaatcaaggacatctgttctgaaactcgttgttccgagtccacggcgcgccgtgacctccaacagctagaagaacagggcgagttactccgcgtacacggtggtgcgaagtatatgaactcactccaagaggaacccgcgatgaatgacaaggtttcccgtaacgttaacgccaaggaccatatcgcgcagcaagccgttgcgaacattcaagttgatgacgtcatttatttggatgctgggacttcgaccctagccatgattcaccatttaaatccgagctacaacttacgtgtcgtgactaatggtgttgtccatgcttccgctttggcagacatgggcatccaaacctacctgcttggtggcaatttgaaaggcaccaccaaagccgtgattggtcccgaagccgttaaatcgttagaggaataccgattcaacaaagtttttcttggtatcaacggtgtccacccaaaattcgggctcacaacgcccgaccccgatgaagcggtcgtcaaaaaaaccgcaattctacaaagtgaagaaagctttatcttagctgacaacactaagttcgaccacgtttcgtttgcgcgcgtcggtgatttatccagtgcaaccatcatcactgaccaactcacgccaagcgttgccgaacagtatcaaccattaactacgattcaggaggttcaatcatgatttataccattactgtcaatccatcaattgactacgtggtgcaactaccccaaatgaccctcggtagtgttaaccggttagcacacacggcaaaactccctggcggtaaaggcatcaatgtatcgcagattctgaacgacctagaccaacccaacaaggccctcggctttatcggtgggtttaccggcacgtttatcagtgatgctttaaaagccaagggcctagattgtcacttcacaccgattgccgatgacacccggatcaacgtgaagattcacgctgaagaagagaccgaattaaacggtgctggcccggacatcaccgccaaagaaatcgaagccttctacaccgaattagccaatttaacgccggatgacgtggtcgtcatgtctggtagtttagcgcctagtttaccagatagcttctactacgatattattcagaaggtcgaagctgctggtgctaattttgtcatcgacacgaccggtgaagctttgaagaaaactttacccagccaccccctcgttgtgaagcctaataaccacgaacttgctgattactaccacacgacgtttaatagccagactgatatcattgcagcgggccaacggatgctagctgaaggtgcacaacacgtgctgatttcaatggccggcgatggtggcctcctgatcaccaaggatgcggtctactttagtcccgcaccaaagggccaggtaatcaactcagttggtgccggtgattcaatgattggtggctttgtcggcacgttcgccaaaacacacgatgctgttgaaagcttccgctacggcttagcttgtggctccgcaaccgccttctcagaagacattgcgacccgcgccaagatcgatgaaattttgccactcattaacattgaaaaactcgctcactaaagaaaggactgttaactaaacatggatatccgcgatttattactaaaagatgtcatgatcatggacatgcacgccacgaccaaggacgaagcgattgatgagttagttcataaatatgccgaacaaggtatcatcaatgatgaggccctctacaagcaagacatcatcaaacgggaagccgaatcaactaccgggattggcgacgggattgctatgccccatgccaaagataaggctgttaaccgggcaaccgtgatgtttgctaagagtaaggccggcgttgacttcaacgcgttagatggtcaacccgttcatcttttcttcatgattgctgctcctgaaggtgccaacaacacccatttagccgccctcgccgccctctcaagcttattgattgatcctgaattggtcgctaaacttaagaatgcacagtcacctgaagaagttcaacaactcttcggtgacgcccaggctgctaaggaagaaaaagaagccaaagatgctgctgccaaggccgaaaaagaagccgcagctgccagcaccaccactgacgaaaaacgtccctatttagttggggttaccgcctgtccaaacggaatcgcccatacttacatggccgaagcagccttgatcaaagctggtgaagcggccggtgttgacatcaaaatcgaaacgaatggttctgaaggtgttaagcacttattgactgccgatgaaatcgctcgtgccgacggtgttgtaatcgccgctgacaaaaaggtcaagatggcccgttttgatggtaagcacctggttaaccgtcccgttactgacgggatcaacaaggccgatcaattagttcaagaagccttgagtggtaaagctcctgtctatcacgatgctgatggtggtgctgcggatgacgatgaaggtggcagcgctaatggtagcgtttggggtgaagtttacaaagacctcatgaacgggatttcccacatgttgccattcgttgttggtggtgggatcttaatggccctctccttcattattgagcaattcgttggtagtaagagcttagcctttaccttcttcaaccaagctggtaacatggctttcgccttcatggtacctgttttagccggttacatcgccgaatcaattggtgatcgtcctgccttgatgcccgggttcgttggtgggttcatggccacggtatacactggcgcttacggtggtgtttacacggcctccattaccgccaatgctaagagtcccgctggtttcttaggtggtttagccgctggtttcttagccggttatattactgtttggatgaagaagtggaccaagaacatgccacaatccttagacgggatgaagccaatgctgatcttcccaattctgggcttattgattattgctgcgctaatgttcttcgttgttaacccaatcttctcagttatcaacgcctggattacccacttcctaaactcaatgggtactggtaatgccgttctcctcggtcttgtcctcggtggtatgatgtcgatcgatatgggtggtcctttcaacaaggccgcttacgtcttcgcaactggtgcctttaccgcaactggacatgggaacttaatggccgctgttatggctggtgggatggttccaccattggcaactgcgattgccactgccttctggccaaagaaatttacggatgacgaacgtaaagctggtatctctaactggttacttggtatttccttcattactgaaggtgccattccattcgccacagctgacccattgcacgttatcggttcaagtgtgattggtgctgccatcgccggtggcttaactcaactttggggcgttgccgtccctgctcctcatggtggcctctgggtctcattactcgccacgaatatctggggctacatcggtgccacaattatcggtgccgttatcgctggggttatccttggtctctggaaaccagctaaagcttctaaataatgtgatatctaaaaagacgatcaaattgatcgtctttttttgttttcaaaattaacgaatcagccgtctaaccccgcaataaaacgggtataatgaaagtaatatactgattatgttaacgagaatcgagacgagtttgatgaaactacgaaaatctatctttggcatcagctgtgtattattcggcatgatgctgctttccggttgccaaaaacaaactaaaatgaccctgccccctgtcagtcacaagaccttaacagcgatggtgatcagtgatgaccatgtcattgcgcccagcctgcatgataatggtaaggctttcacgcagtacgcggctaacgatgccggtgcagatttaaaatacagcgcgacgatttttcgcgcttttattgctaaggcgttaatcaccaagcctgacgttgtgctcatcagtggcgatattactaacaacggtgaaaaagccagtcacgagtacgttgccaagcagcttcgccgactgactgctaagcacatccgcgtctacgtcgtccccggtaatcacgacttgaacaaccctatcgcccgtcgcttcaaaggaaagcatcaatatagcaccgaggcgactagcccgacccagttcaagaagatctatcatcaggccggctacggccaagccagtgaaactgacccaagctcattgggatatttggtaaaacctagtaaacacacttggtttttaatgctaaactccgccatttataaaagtaattatcaacaaggtaattcaacggtcggtggtggcctgaccgatgggaccttacaatggcttactaaagtcggtaagcaagcaaaacaagcccatgcgactctcattcccgtcctacatcacaatacaatggaccacacggtgattcatcaggactatacaatcggctatgccgaagatgtccgtaaggcctttaccactgcgggtatcaagttatcgctcagcggccatattcatgctcaaaatatcaagtctaccaaagtcaagaaccagtcactgactgatattgccagtggcgccctgatactgggatctcactattacggtacgcttaagatcaaccagagtaacgggacggccacgtaccacgcgaccccgttaaacgtgagtgcttacatcaagcaccaccgtggtaataaagcgatgcgcgcctatcaaaagtacgatcatgacgtgttatatgcggctggctataacgcagcactgagtcagttatatgaggaccgtgacgaaacgcaactatcaagcgctaaagttaatcagctagcccgcggcatggcggccgccaatatcgcgctctttcggggcaccccagtcaaaaatagcgccgctattcaagcttggcaacaaatgccccacaatacaagtttgcgcggcttcgtgttagccaccaagaaactacacggcaatgtgacgtggtctgggtccgtacaataaccactttataaactaaagacgacagcgaattttcaggctgtcgtctttttgattagtcactacttatagctggtcagtcacaccggcaccaccctacttcgattcggctagattggttttcgcacacgtagcatttggttaacaatggtcattaaataatcacgcttgctaaatccgacgacggccgttatcaaaatcaatagataacggagtacaacactgtgatagcctcctaaaaatagaaagccaaccgccaaaaaagtgagcgtaatcagccccagtatcttgcgatcatatggaagcgtgccaagtttttcgcgacagattcgattcataaaccaataatgaacagccgcatacatcacatagcaaattaatgttgtatatcccgccacctcgtatcctaaaattggaatcaaccaataatttagcgccacattcaatactgcgccaataacactggcaatcatgattaaagatgtccgttcataatagaactcaaactttgcaaataaatcaaaagcaaaaatgaaaaagacgctcattgcgattggtggaacgatccaggtcgccttagcatacgctcgtggtgcgaatatcgaaacgatttcgggcgcaaatgcaatcaatagcaggttgacaaccgcaattaaaactaaggcaccgtaagcgacacccgcaatatcggccacccgtcgatccttgattttttgatatatccacggactcagcgtttgcgacaatgcaacgttaaataaaatcatgatttgtgaaagtgagtacgccaaactataaatgcccgcacttttcgtatttaccatgttcgcaatcataatccggtcagcactactcagaacgatttgtgaaagataatgtggggccaacgggatgttgaacattaatgcgtgacgccaaaaatagcgcgagaaaaacgttttgccacgatacatttgcacaaaaaacaagcccgtatagcctaccagttccactaatgctagccctaaaaatcgagccgtcactttatcattcgcatacacaacgagcaatacgcctactaacggtttggcgattgcaaccagcaaggtcaccatcaccaatgatttgtattgcaaggcaactcggcgctcaccagcccaaaaattaaaaactgacgaggtccataccattagaagcatcgccaacatctgcgtcgtcgttaaagaaaagacactattccaaaaatcacgaaagccaagataaactagtgtccatgctaataccaacacaaccgttaatccttgtaatgcagccgaatatcgacgtcgatcatggctgaatttgatgagaccttgagtataaacgccgtagcacagatttagtgagacgatgatcgtgacgatagtcagccaggagtacagcacattaaattgaccatactcggaagtagacattattctggtaaaaatgggcgttgcgattattgaaatgctcttttcaaaaaaagcacagattaagaaccaaagtgaggccttaacttgctttggcaaatgccgatatttatttctaatactgactaacataaattcctttctcatagatctgaactgagcatcacatcccgtgcttactaataacaaatctcataagcaccgcacacgttcaatcacttggttgttgtcgataccggcgcccatttaccgaccaaatcgttcttaaacgtaaatagttgatcacatagtaacaattatctggggatgtcaccattgcgcggactaacgcagccagggcctgaccaagttttcgtttgcgtatactggccatcgccatcgtaaaatatttttgcccacgattaaacgtactttgggcacggacgtcatttattttgtctgttaacgccgacatcccgcggccgaaactgtctgctcccgtccgtttacgttccgcatacaattgttgaatatagcgcgataccagatacgttttccacgcgtcgctggtcatactattaccgcgtaaccgatagttcaacactcggcggttaattgacccgattttgaatccattagcaagcagccgcagccagagatcatagtcctcagccgttggtaataaacggtaaccaccgacttgttggacggccgttttccgcattaaaacggtgggatgaataattgtcgaaccatagggcaggattttttgaattagtggttcagcctcgggaatggccgatttttccccgacaacctcatcctgttcatcaagataagtaatatttccggaaattaaatccaaatcgcgcgtttttaacgcctctaattccacttcgagccgattagtgacagaaatatcatccgcatccatccgcgcaatcaactcattacttgctagctcaatcgccttattgagactagcggccaggccgaggttttctggattgcacactagtttgatcatttccacacggcaatcgtaatccattaacaagtcttttaaatcactccgttctggattatccagtacgatcacaaactccctcggcaaataggtttgcttcaaaatcgagtcaaccgcttgctggacttgctcaggtcgttcattatatacactcataattacgctgattgccattttttctcctcaatcttcaattcagttgaaagtaaataccccaagaatatcattgccgtcagtaccatgccgctgcgcgcaacctcacctttataatttgcgattagtagaactacgccaaaggctagaaagattttactatcacgaacaacctttccagactttttgtggcaagctgccaacgaggctataatcgtaccgtacagtagcaccatgtaaatgatgccgcccataaataagtcattaataaagccaatgtcggacgttccgaaccaaatattgctggcattgccaccatatacgcgaacaccataaccaaacacccaatctaaaagctgactcggaaacatcaagaacgagcccgtcagttgttcgtaattgccctgcttactaccttcaaagacgagtgcaaacgtatcttcaaagccactgacgatccaggtatacgtatcaggctggatggattgcagaaaagccaaacccagtatgataaaggtcacactcaacacgataatcagtgcaacctgaaacagccctcgaacactggacagcattcgtttgaccagcatcaaggcaaaaccaaaagccagcgtgatcaagccagttcggccgtttaatacgataataaagacacaaaatggcaggaaccaataatactttttgccaaggttcattcccatatatatcgcaactagtcccatcagactatggtagattggtgtaaaaaatgtgtaatcactgctgattccatacaaacgttcaccataaataaactgattctgaataataccggtggctgtttttgctaaaatcgcagcgcgaatacccgaacttgccagcatgaccaaagcaaacaagcattgaacaaccaccatccatagcatccaggtcaagaccgtttcacttgtcacgttaaaatacttacgaagaacttctagccataacaccaaggcaaggacattcaaaataatcacaacattttgaaacacccggggatcatttcctgccagcttcgctctgaacgcaaaataaataactgaaagcaccacgccaattacaaaaattcgcagtcgatttatggtgaccgataaatcctttggtgacaataacaatatgcaaccaccagtaatccccagtgtaacaatcaggggcacataactactgctccaaaagttgggttggtaaatcaggtaaaatccggcaatcaatagtcctagttttaagaatggcccgccaatttgacgatttactgcagtcatcgttccattactccttcataaacttgctggattcgttggataaatcgcttttgttcataatcactaaaatcgaccgccgctattttagccttggttgtctgataaaatgggtcatccgagaagagacgtgtcagtactgctaataattcatcatcactcgtataaacgatgccgtttaccctcgcagccgtttgagagaggccaccaatacggggggcaaacggaatcgcacccaacaaagccgcctcgaccatggtcaatccaaacgcgtctgatttggacgtcgacagcacaactttggcatgccgcatgtatttgtaagggttacttttaaaaccaagccagcgtatttgcggggtggctgcaatctgtttagcgatgggtgtacttaggctaccatcgccgacaatcccaatatttagttcagggatagcgtctaataatttatgcgcaattctcacaaatcttgcgggatctttaacatcttccaaccgtcccacgaataacaggtcaaatgcagtggttgtgctggcagtagccagttggcatatccgtgaactgtcgattccattgggaataatcgccgtattggttaaatgtttgtggaagcgatacgattctttggcccaatctgaaacatataagactcgtgagctcttgttgccaatatattgaaacgccaaacttttccagttcacactagtctgccatatcggggcttgatggatatgggtgataattggcacatggtgaaaaagtaggttgaccaaaaaactcgctttgaaatcgtgtgcatgaataatatctggctggagtgccagaatagctcgccgaaatttaagaagctgtttcggcgaaaaactttgatacgcgattccgacagcttgcaagctttcttgtattgatcctgattgtgagcaataggtgaaatcataggatccactcaaacccctactgatattaatgaccacctgctcagcaccacctaatttggcggaaaacaagacatgaacaatttttgtcatcgacaatcgtccctcctaggccaagcaacgcaaatagtacgcctgcgtttgttcaagcatctcatgctcagtatagtgacgttgatacatttgataggaattagtcttgacctcggcgatctttttcgattgatagagtgtcagaattttttcagcaatctggcgcgcatcattggtgaccaaaaagccattatgatcaatcaattcctgaatgcccccaacattcgacgcaataatcggcagaccttgggctaaggcttccactaaactgattgggagtgcttcataatcagaaatcagcaccccaacgtccgattgagaataatatttttgtacattatccaccaccccataaaagttcactttaccatccagattcaactggtgcgttagcgttttacaggcttcaatcgaagggccgtcacccagaaaatgacacacgattggtagattttccggcaagtatgtcaatgcttgaatcaggatatcctgccgttttggtgtatcaaagcgtgccgccattgatagtacaaagacctcggaactggtcgccttgtttgcgcccgttaatgctgtcacgccattatggataacacgagcaggatgagcactagtaatcacaccactttggacacccaaatcataatcaaactgcgagacacagatgtaagccgttgtcaggcgacttaatgctttttcaatagttttcatcaatagctgccgtttcttcccgacaccaggagtaaagccccagccatggaccgtaaaaatgactttcattggcaatctaatcgtggcgagcctcccaatcataccagccttcgaagaatgcaaatgaataatatctggctgccaattttttactaatttccttaacgtgtagattgctttcaaatcactcagcggtgcaatcggatgtaccaggctggcaactctgacaacttgcacgtcttgaaattctttcgcgacgcttgcactcaggcgtccttcaacgccgtatactaaggcaacggcattgccacgcatcacttgcgctttgatcaaactatatagatgcgcctgggccccaccccaagtcgcttgagtaatgatgtaaacaatcttcactaccgcgcaccatccccggaaataatcaccctaaccgttcccatcagcatcttgatatcaaaccaaatcgaaaagtgctcaatgtaatagttatcgtactgacacttggcacccggtgtaatatcatagccaccattgatctgcgcatagccggtaatgccaggaatgattcgtagccgtttcggaaaatcaggatagcgttcactgaattgttcggttagttctggccgttccgggcgaggtccgaccaaactcatatcgcccttcaaaacattccaaaattgtggtaactcatcgatccgagttttgcgcatccagcgtccaaccggcgtcacccgaggatcatttttttgtgcccagatcgcacccgtctgcgcctcagcgtcctgatacattgatcgcagcttaatcacgtcaaaggtcgtccccatccaaccgactcgcgcctgcttgtagaaaacgggaccgtcagaagtcaacttgataagtatggcaaacacaattacgatgggaacgctgagcagtgtgcccaataagccgactgctagatcgaaacaccgctttagatccatcttccagccggtgaccggaacaccaattttactaataaattcacagcgttgttcgtcagccacgattgattcattaatctcaacttcgtgcatgctcacattccccttcccagtacttggttaatcctcttctcagcggccactctgattcataatttaggcgtgccaacttgccaatacttgcaactgaatgatcaacttcaccaccccgctgctcggcccgtttgatttcaagttgttgaccagcaatctcttgatacatctgaataatgccatttaaactagtttctaagccattggcaatattgatcacttcatgttgcacttgatgttctgtaatcaaccataatgccttgataacatcacttacatatacaaaatcacgggtctgcgttccatcaccgaataatgtaaatggtcgctgtgttttcaaacaatccgtcaaaatcgacaaaacccccgaatacggtgagcttggattctgacgcggtccataaacgttgaagaaccgcacacaaacggtcggcaaatcgtacaactcaccgtatgccaatacaaaacgttcagtcgcatacttatcaatagcatacggtgacacaggtgcgacgcgcgaatcctcgcgttttggtaattcaggtagattgccataaaccgccgccgaagaagtgaatagaaattgcttaataggcaagcgaatttggcgaatatgttcgagcaagttaaataccgcggtatgattgacagcatgcgtttctgccggtcgctcaatcgaatccgccacactcgcaatcgctgccagaaaataaatatagtctggccgttcgtctgctaacaattgttgcatgaatttatcgtcacagacatccgcgacatatatcgtaatctgttcccaatgcttgatattgctgatggcccccattgacagatcgtctaccaccaccacctcaaagccagattcaactaaatgatcaaccaagtgcgagccaatgaaccccgcacctcccgttaccaatgccttcataactatttacccctctcaaaaaagccaaaattttcgtcgctgatttggtcgcaagacttcccctaacactactggatccccgttcagtagcagtcttgcattcactgcaaaagatgcaggattggtactatctaaccgtgctaatgcctgataacctgcccgcatcataaatcctcgtcgtgccatcaaatgcgcatctgaagcaatcacttggaccagcccgcattcaactaattccagcgctgtacttttaaccgctcgcccaaattgcccaacgagactccccgctgttagctgtgccaaacagccctgctgcactaaatcatagagccgctctggttgtgccataatctgagcatttcgctctggatgggcaatcaccggagtcgtcccttgctgtaagagctcaaaaattacttgcgccacgtaattaggtacctgctcgtgtggcaattctagtaacaaatagcgccgaccaacatcaattcctagcaagtgcggcagagctgtcgccaaatcatctcgcaaatggacctcctgaccggcaaaaacggtcagtggaatttgttgccgcttaagttcggcctggagctcggcaacggcccgctcaactaccaggccagtattctgataacgccgatctagatgatgtggcgttgccaagacgtaatgaatgccatcagccaccgcttgtcgcgccatttcgactgcctgagcaagctgctgggggccgtcatccaatcccggtaataagtgacagtgcaggtcaatatactcagttggtctcagtcccataatagccgtacccataaccgtgagttttaatgtccacgtcatttaaaatagtcccgagtaattgtgcgcgagcattcttcaaggcactcactgcctggcgcaccgcaactttttcgacaaagttttggcgaacgactaggacagtgccatccacttgaccagctaagatccgagcgtcggtcacgggcagtatcggcggcgcatcaacaatcactaaatctaacttacgtgttgcgaccgttaaaaactcggtcattctatcgctggctaataactcagctggattgggtggtttaggcccactcggcatgacaaacaaatgatcaagtacgggataaatggcctcgttcacgtccgtcagttgcccgcttaaccatgaactcactccccgttgattactgattgcaaacgtctgatgaatcgtcggccgccgcaaatcagcatcgacaagtaagacttgcaggcctttcttggcgtattccacggctaagttgctgccgaccgttgattttccctcgccctgaatcgctgacgtgatcattagtgttttcaacggtttaccgaccatcgcatagttaagatttgttcggatcgttttgacttgctcagttacgactgacatcggtgccgtcaaagttgttaactgtatgccggtatgcatattcgctactcttcgcctcaatttcataaccgttcccccctatgttaaactcgtttgactgccgctttaacaactgacgtcaccggctgtggtttaattgccggttggtcgtgagtcgctgtgaccggctgttgatgattaatgattcctagacttgtcagcattaattcatctgctaggtattcgagtgtctgcactcgccgattggacaagattcggacacttgcatacaccaatcccaaaatcagcccccccacgaaaccaattaggatattgatgatttttttaggcgctaccggctgatccggcgtctctgcgggtgcaacgatcgttacattattgaccctaataatatgctggacctgatctttaaacgttgcagcaatttggttcgcaatcattgcactagctttcgcatttttatcacgaacaacgattgaaaacacctgcgaattggccgtactggtcacgctgaccgtttgcttaagcgactcaagtgagcgtcgaatgtcagtttctgccattaaagtctgccgtgccggcttcaacacgactggttttgtaattaattccttataagtcgtaatcatctgcacatcggcttgctggcccgtcaaatccgcgcccgcactactgtgtttgcggttcactaatatttgaacattggcttgatactcgggctgaatgacccacaaagtcaccactgttgcaatcgtcccgcccaaaatcattaaactcaataataccttccaatactgacgaatgagtttaacaataaaatcaaaggttattacttgctccattccacacgctccaatatttcttgactgacttttattaaacgattgacattattgtagaaaaccagttgcaaacgacgcaatagttttcacgaattttcatgaaactcatataaatacaagcgaatattcgacaatctctaaatttaaattgacattatagacaataatgttatatttattgatagttactaatcaaaataatataaatcgtataattatttgactttattttagctcgtatttacccacaattatttcgattaaatcatcggttactccagcaaccaatgtgcttttcaactaatcacaaaatcgacatttttacaaatcaatgatgctttcaagcatcaaaaaagaccacctagttcgtgaaaactagatggtcttcttaacattaattacattagttagccagatgacaactatgtggcgcccttttgataatgcttcggtgttacaccaccaccggctaatgaaaatttgacagtttgtgcaacgtttttagcaattcccagggactgaatctcttccagtgaggcaccagcaattttactcatcgatccaaatttacgtaataatttattacgcgtcttcggcccaacaccaggaatctcatccaatcgcgaactcaatgaatgtttggtatgcacttgtcggtggaacgtaatcgcaaagcggtgcacttcatcttgaatccgttgtaacaaatagaatccctgactcttcggatctagatgtagatgctgatccccggccgaagcgagtaaatccgccgtcttatggtggtcatttttgaccatcgccgcgactggcgttgcaatccctaattcgttctctaagacgtccttagcggcttccagctggatctcgccaccatccatcaaaatcaggtcgggcaatgctgcatgctccttcagtagccgtgtatagcgccgccgaatcacttcacgggtcgatgcagcttcatcagcatgatcgaccgtccgcaacttatatttccgatacaattttttattcggttgcccgtccgtgaagacgaccatggcagaaaccaagtcggccccctgaatatgagagtggtcaaaagcctcaattttatgaccagcaggaatgcctaaagcatccgtgatttcttgcatcgcccccgtcgtcttgcgcgcatccaattccaacaaccggaacttctcttctaagacgattcgagcatttttttgtgccatgtccagcaaatcctttttctggccgcgttgaggggtccttaccggaattccgagaatgtcactcaggacctgcttatcaagaccgttggggactaaaacttcgcgtggtagaacgttatttttgcgattataaaattgcaagataaagctcgtcatttcttcaggtgcagttgacactactgggaacaagcgtttctcgcgcttcatcaaccgcgcttgccgaataaagaagacctgaatcgaaagccagcctttatcaagatagaaattaaacaggtcgcggggcgtattatcgtttgaaataattttctgcttttcaaccgtcatttcaatataattcagttgatcacgtaattcagcggctcgttcaaattctaggtcagcggccgcttgatccattcgtttagttaactgcttcttgaccgtttcaacgtgaccattcaaaaaggatttaatccgcttgatctgagcgtcatattctgccaccggcaccgttttaaagcaagctcccaagcattggcccatatgataatagagacacggccgcttctggaaaccatggcaacgccgcaacggatagaccttctgaataaaattgaccgtttcctgagccgcgtaaacattgggatatggcccaaagtagtagccaccatctttacgaacatcactgacgatcaggatctgggggtctcgttcattggtaatcttaatgtacggataaccggttcccttttttaatttaatattaaagtacggttgatgtttttgaattaacgtaatttctagcaggaaggcttccttatccgttgaggtcacaataaactcaaagtccgcaatctctgatactaaccgcgcggtcttaccagtatggctgcttttgaaatatgaacgcacccgatttttcaagttcttggccttacccacataaatgatctgactgtttaagttcttcatcagataacatcctggtaagtccggtaacaaggataacttatgttcaatatgcgcggatgccataacacaccttcccttcatttagattagcattattagtataccgcctgctagcatggggctcaaccaaacagcccggaaatatgatttttattatgaccgactattcatcactgtcgctactgatcacagtgtagcaaaaaaccggtaatcagcaactgagctgattaccggttatgtgttgtttacatcaaaattttagaaagaaaatcttgggcccgctctgtttgcgggttcgcaaagaattcctcaggcgtattattctcctgaatatagccatcagccatgaaccagattcgatccgctactgacttagcaaaacccatttcgtgagtgaccacaaccatggtcatcccatccttagcaagttcttgcatcacgtttaacacttccccaaccatttccgggtccaaggcagacgttggttcgtcaaacagcatcacttcagggttcatcgccaacgcacgagcaatcgccacccgttgagcctgaccacctgaaagactacttggaaaggcatccgcatgatcgtccaacccaacgcgttgcaataattcgtgcgcttgcttagtcgccgcggcatcatcgacatgcttgaccttcatcggcgccaatttaatgttttccaatacagtcatgttgggaaatagattaaacccttggaaaaccattcccattttttcacgtagcgcgttaacactcttcgtatccaaagttgtgagatcttgaccttcgaaagcgacttgaccacttgtgggcgtctcgagtaagtttaaacaacgtaagaaggtactcttcccaccaccagaaggaccaatcaccacgatcacctgaccgggttcaactttttctgtaatatcctttaaaacgtcattttcaccgaagctcttcgcaaggtctttaacttcaattactggtttagtcatgttgcattctcctttcgaagtagttcaagatccgtgaagcggtaaaggttaagatgaagtatagcaccataataacaacgatcggtgcaaccccccggtacgtatctgaacgaacaatgttactttgataaattaattcagtgaccccaataatcgaaacgatggaactatccttgatcaacgtaataaattcgttcccaagtgatggccaaatgttcttcaatgcttgtggcaagaccacgtaacgcatcgtttcaccgttggacattcctaaactccgagcagcttccgtctgcccaacatcgacggaattaatcccgccacgaatatattcagcaacgtacgcaccagagttcaaggaaatcgcaataatcccagaagtcagtgctggtaaattgacgaataacccaagtccgaagtacacaaacatcacttggaccatcattggcgtcccacgaataaattcaacatacgcagttgctaaccaccgaatggcagtcttaagtggatttcctttagccatccgtgctaatgccaataaaataccgatgataaaaccgaagaaaacggagcaaaccgtaatgattaacgtatattcgatcccggttgcaaaagccttccagtaatgtcccattgacgtattaacggtattggtcttcaaatacttgccggctgccggtaagtattgctttttaacgaggttctgtttcttaatccgatcaacggtcttattgactttgttaacaagactagttgaacctttccgaaatgcgatcgccgaactcgttgcactagagctcatgttgaagtcactaggaatagcaaccaaactcttattgtttgcaacataggcttctgcagaaggcttttccatagcaaccccatcaactttgtgactctgaagtgccaaaatcagatcagattgtgaagtcatccctttagccttggcagtcgtttggtttttgacggcattatattgagtcgttccagtttgggcacccaacgtgccattcttgaatgaattcttattcttgtacttgcccttatcagtcttattgatgacaatatcgtagccaccttgataataaacgtgggtaaaatcaacatttttccgccgtgaaggggttgggttcatcccagagataatcatatcaaccttgccagtttggagtgccactagcaatgagtcaaatgacatggatttgatcttcagcttcacgcccagatccttagcaacttgtttcccaatctgaacatccatcccaacgatcttactcttaccgttgaccgttgcttgaaactcatacggtggataatcaggcgacgtccccattactaagacgccctttttctgaatttgttctaatgaattatcggccgcttgcgcatgttgcgtctgtccgagtgggacgacggtcatgatcagggccacaataatggctaaaaaccacccaaatctttttttcataggtattctcctcgttttgtaatttacaagaataaagtataaccgcatatgattatttatgcaagtatttttgagaatttctttattttatgcataaataagtcgtttatacacgttttgacccattgattatgcataaaagacgaataactgacaaattgtcggaaatttgctatgataggcgttaatcgaaaggaatgattttatgagtttaaaagtacagcgtcaagataaccttgataagctattcgacaagtttgccattggtcctgacgataaggataaactcaccactaaagcggttcaggatactattgacgaacatgctaaacgcaaagaaaataaggcagctgataaaaaggacgcccataaatagcagtcaaaaaaacgcaatggcagttagccatcgcgtttttatttgaataactatttagcaaattttagtcccgattgtttgcatcttttcgcgccgctctgcttccgtttctggtgaaacatcgcgccaatcaacaacagccaaagcaccgtcgagcatcccgctatcatccttgagcgctaaagcattatgccagcgagaaatgttgaggccgttccccaagtaggcttcatcagccggtgcaacgtgcatcacataaccagcattattttctaatggcgtggtatagtcgggatcagcggctttaagaataactaactgaaacttattaccaatggcacagctaccgcctaaactcgaatatttgttagaaccatcgtcagttgttaaaattacttgactccctgccggaatcttatctgcaaggtaggcttgagcatcgtctttgatattaatcttcatagttaagcatcctttccgtttcaaaaacatttaagttgtgcacaactcttttacagtctttaatttacgctatttcagctgcaaatgcaattaatttacctagaaaagtgaaaataaacagccgaactcaataatgacacaatttttgcaaatgatatgtggtcgtccgtcgcaataaaaaagagttgggctgccagccttacctgctgacagcccaactcttcaggttagaccactcttcaccgactatttaactggtttaccattcgggtacttatcgttgagtttaacaatattttgttgcgcaacttcttcgaacggaatatccgcccattcagcaacttgtgataagtaccataacacatcgcccatctgtttcgtcagctgatctttattcaaacgttcaccatgaaacgtatactttttgactaagtcaacgacttgaccagtctctgaagctaatcccagcgataagttcgtcagcacctgctcattaccatataatgtccgatttgctaacgactgatactcattaaattccaagttagttgcctcccacagtgtgcgcttcgatccattgccaaacagcatccttgccttctttggtcttagctgaaaaggcgataaaatcgtcttcagcttggaagttaagcgtctttttaattaaactttcctgtttgttccacttaccacgcggaattttatcacttttagttgccacgaccagtaatggcatctcatagtaacgcatccactcgtacattgcgacatcgtctttagttggcgcatgacgtgcatcgactagaataacgacacctcgcagtgtctctcggcttgttagatacgtctcaatcatttgtccccacttctcacgttccttcttagataccttagcataaccgtatcccggaacatcgacgaagtataattgatcttcaactttataaaagttcagtgtttgggtcttcccaggttgactagacgtccgcgcatagctattgcggttaatcaacacattaatcagggatgattttccgacgttagagcgccccgctaacccaatttctggaaacccagtagtcgggtactggctcggcgctaccgcgctcatgacaagttcaacgttatgcacttccatcgaattaactccttctgcaatcgtattgcattcattttaccataatttttgcagcgggttgtcatccgcgctcaaattcgatttaaacagcactcaggaccgcgaatgaaaactcatcgcggtccttagtgctgtctattgatcttctgaacgaaacgttaggaagctttttgatcagctaaaaccagttctggttcagcgtgatcagcaaccgtctcgcgagtaataatcacctttttaacatcttcacgacttggaatatcatacataatgtcccgcatcgtgtcttcaataatcgagcgtagaccccgagcaccagtattacgtgctaaggcttcttgcgcgatggcacgtaaagcgtcatcgttaaagtctaattctgcaccgtctagagcaattaggcgttgatattgcttgacaagcgcattctttggttccgttaagatccggaccaaatcatcttccgttaaacgttctagcgcagtcaagattggaagacgcccaataaattcaggaattaaaccgaattgtaagaggtcttctggcacaacttgttgcatgagactcttggaatcgtctagaacggcattcttaccatcggtgtccgtaccgaaaccaatcgttttatcgcctaggcgacgtttgacgatgtcttcgattccatcaaaggccccaccaacgatgaataaaatgttggtcgtgtcaatttgaataaactcttgttggggatgcttacgcccgccctgcggtggcacattggcaatcgtaccttccaaaatcttcaagagggcttgttgaaccccttcaccggaaacatcccgtgtaattgagacattttcactcttcttggcgatcttatcgatttcatcaatataaataatccctttttcggcacgttcaacgtcgtaatccgcattttgcagtaatttcagcaaaatattttcaacgtcttcaccaacatagccggcttcggttaacgtcgtggcatccgcaatagcaaatggcacatccaaaattcgcgctaaactctgagctaagaaagtcttaccagaaccagttggtcccactaagctaatattactcttttgtaattcaggaccatcttcggtctcttcatcattatcagccatggccttaaccctcttgtagtggttataaaccgcaactgatagggtccgcttagcttcattttggccgatcacgtattggtctaactcgtctacaatttcctttggcgttgggatatctgttaattcatgggtttgttcttcgctaaactcttcatcgataatttctttacataaatcgatacattcattacagatataaacgccgggtccagccacgatctttttaacttgatcttgtgatttaccacaaaatgagcagttcacagggccgtttgtctcggtattttcaaacattcattctcacctcatcgatgtatttacatggattaatcataacagaaaaactgagctaaaaccagcttaggcactgtcttctacgtccactactataacatggacgaacctaaacccgaaattatctgttcaatcatccggctaaccactttgaaaaccgaatgattctcgcagtaaatcacaggcgtcagccaaatagctattaaattaatcttacgattagctgacgctatgtaaaagggtctcggaagaattattcttccaagaccctcgacttgtatctaattgaattaattagttcttgtcgctgtcgtcttttttgtcttctgctttggcattttgcttagcagaatccgcaatcaagtcaacggcttggcgaatcgcaatgtcatgtgacaacatgtcatccgttaaagcaccacgaacagcactttcttccatgttgtattgactagctaaatccttaacttcggccgcaatttcatcctgagatggcttgatgttttcagcttcaacaaccgcttctaagaccaagttagtcttaacccggcgttcagcatcagcagcaaattgcttgtgcaagtcgtcttcagtagtaccagtcaacttgtagtaagtctttggatcgataccttgttgttgcatattagccaagtattgatccatttgacgatgaatatcgtcttctttcatggcatcaggaattgcttgaatttcagcattgtcaaccgcttggtttaaagcttcgtcttcaattgcatcatgcgcagcggattccttttgttccttaagttcgtccttgatcttagcttttaattcttcaagtgtgtcaacatcttcgtcaacatccttggcaaattcgtcatctaattcagggagttccttagtcttgacttcatgaactgtcactttgaaagtggcttctttgttttgtaagtcttcagcttggtaatccttagggaacgttaccttaacttcagtttcgtcgccagccttgacaccaactaattggtcttcaaaaccagggatgaatgagttagaacctaattcaagtgagtagttttctgattcgccaccttcaaatggttcgccatcaacgaatcctttgaaatcaataaccaccgtatcgcccttagcggctggttggtcttccttcagaactaattcagcttgtttttcacgccgtgattctaattcggcatcaacatccttagcataaacgcgagtattttgacgcgttacactaagttccttgtattgaccaagcttaacttctggtttaaccgttacaacggcctttaatacccaaggcttacctttttccatgctatcaacatcgatttgaggttgatcaactggttcgatttcagtttccttgattgcttcttcatatgcctctgggagcacgatgtttaaagcatcttgataaagtgcttcttcaccatacatttgattgaagatttgacgtggaaccttacccttacggaaaccaggaacatttaagttctttttagtccgttggaaggccttgtcgataccttcactaattttatcagcaccaatttcgaatgttaattcgccttggttgccttctttcttttcccactttgcagccattgtattccctccgaaacattataatttctacaattctagtcaattgcatacttgttaagtttaacctatcgacaccgtaaagtaaaccaaattggctaaaaaagcgcgtaagctcgcgatttattgttcgtttttcttaaaaaaagcgacttggaagaagacttccaagtcgcttagatcaatcaatgaaaatcagttagagattagtcatcaatttctgaaacaacaccggcaccgacagtatgaccaccttcacgaaccgtgaacttggtacccttttcgatggcagctggttgaatcaattcaacagtgaacgttacgttgtcaccaggcataaccatttcaacgccgtctggcaattcaataacaccagtgatatcagtggtgtggaagtagaattgtggacgatagtttgagaagaatggcgtatgacggccaccttcttctttgctcaagatataaacttcacccttgaacttcttgtgggtttggatcgaacctggcttagccaaaacttggccacgaacaacttgttcacggttaacaccacgtaataacgcaccaacgttatccccggcttcacctaagtcaagtgtcttacggaacatttcaagacccgtaacagttgacttaagaacatcttcgtgtaaaccaacgatttcaacttcgtcgccgaccttaacagtcccacgatcgatacgaccagaagcaacagtcccacgaccagtgattgagaagacgtcttcaacaggcatcaagaaaggcttttcagtatcacgaactggagttgggatgtattcatcaacaacatccattaagtgcatgataaccttttcttgttctgggtcgccttcaagtgctttaagcgctgaaccacggataacaggaatatcgtcaccagggaaatcgtattctgaaagtaattcacgtacttccatttcaaccaagtcaactaattcgtcatcgtcaacaagatcagtcttgtttaagaagacaacgatatagtcaacaccaacttggcgagccaagaggatgtgttcacgcgtttgtggcataggaccatcagttgcggcaacaactaagatcgcaccgtccatttgagcggcaccagtaatcatgttcttaacgtagtcagcatgtcctggggcatcgatatgagcgtagtgacgcttttcagtttcgtattcaacgtgggcagtgttgatagtaataccacgttcacgttcttccggagcagcatcgatagaagcaaagtcttgttctttagccaagcccttagatgctaataccttagtgattgcagcggtcaaagtagtcttcccatggtcaacgtggccaatagtaccaatgtttacatggggttttgttctttcataatgttcttttgccattaatgaaacctcctgtgattttcgcaagaataacgtcgaggccaaaatggtctcaacaattctttagttagtattatactacatcctagtgaaaaggccaaatcgcgcacccatcactgagaatccttaaatattatatatagcctaatctgatttgtaaacagatattattcaaaaaattgaatttttgttagtaaattcttattacacacgcttatgattgtaaatcaaggctaaattgctgaattttttgctgaattttcatcattttttcagtttggtcatcagacggcgttatcgtctgcccagtttgcaaactaatcaaaagatcgatccaagccgtggaatctgtaataacctgtgcagcgcatggatataaatacattaattgcaattgtaaaagttctcgtaagctttcatataaaaagacatcttgattaccaagtcgcactttcaaagcatggtaaacggccttgctcgtctcgtcctgaccgagtgcgactaactttgctggacacagtgtcaacatcttctcatccagtagccactgcatcttgaccgtctctgatacttgcaattggtacagtgtatataacacttctactcgtgttaagggatgcaaaaacggatctactaatagaaacttggctgccgtcagatagcgctcatatggcaggtgacgggctgcttgcaaacctgccacctgtttctggacgggctggtcagataaatgataaaaatgacgcattgttgtggtcaatgtcgatcctagcgttcgctcagccgtactctccgccgcttttaaagttgtgtttgcagccgtagtccacgcactcgttgggcgtgccttgatcataatgtgggcagaaatgaagtcatgattagcaaccaatgcattcagatacagatctgcggccgcatcggttgctaaatactgcgcttcaaactcactggcataattagctgctgccacatattgttgatcagccaccaacgcttggaccaattcgtaattaactggtgccgtttgctgtgcctgatacacttgctcccacaaactagccgccttggaccaatcctgagctcgactggcttgttcggcggccaattgtgtttcagctattgtcattgaaccttcctcctcttcattgtaaccaaaaaagtcggaagtagcttccgacttttttaatactaagctttagattcagtctcgactggtttggctggtttagccttctttgtacgccgatgatgctgattaacttccataataaccggtaaaataactgggtgccgcttggtctggtcccataaataatggttcaacttctcacggacagcctgttttaaatggccccaatcaaactctttattatcgagattttcttgcaccgtcgttttgactaactcagcgctctcttgcatcaagtctttactagtcttgacgtagacgaagccccgtgaagtaatcttaggagtcgcaataatcttcttctttttgcgatcaatcgtgaccactgccacgaaaataccgtcttcagacaaaatcttgcggtcacgtaacacaatgtttccaatgtcaccgaccccgatgccatcgatcatcgtatcgccgacttcgattgaaccggccaagtgcatggtatcaccgtcataacgtaactggtcacccttggctgcgatcaggacatggtcgtccggaattccaacttcacgtgcaaagtccgcatgagcatccaacagacgatactccccttgaatcggaatgaaatattggggcttcatcatgttgatcatcatttgcaagtcacgtttagcggcatggccggaggaattcatttcatcagcaatcgccttaacgtccgcatcagcacgataaatcatatcacgggtcttggcaaccacggtttccatcgaatgtgacggtgtggtagtaataaataccagatcacccttttcgatattgaccttgctctcctgcttattagccatccgttgtaaggccttaataggttcgcccattcggcccgtttgtaaaatcacgatttgttcaggtttaagtttatcaatggctttaagtggtacgacaacgtcttcaggcatgtgtaacttgcctaaatcgattgcggtcttcacgatactctcaacgtcaccaggcattaaagcgactttccgattagactttgcagcggcatctaaaacttgctgaatacgcaagatattggatgcaactgaagcgacaatgatccgtcctggatgatatttaaacgtttctaaaacataggccgcaatttcacgttcactgaccggctgttcataattttctgcattagctgaatcactaagtaacgccaagacgccttttgatccaatctccgccaaccgcgcaaaatcagtctgatagtcgcctgcggccgtcggatcaaacttaaagtcaccggtataaacgacctcaccggcactggtttgcaacacgattcccattgaatctggaatcgaatgggtcgtgcggaaaaacgaaaccgtgaccgtgccaaaatcaatttctgtcttctcattaatgatgtggaagtcattaaagtttttagctttagggtccttttgcaattgaatttttgccaactcaatggttagctctgaaccaaacacgggaacgttgaactcattcaaaaagtacggtaacgcaccaatggcatcagcgtggccgtgggtcaaaaagacaccgacgattcgatcagcattttctcgcaaataactgaagtccggaatcacgatatcaattcctaacaactcattttctgggtactttaacccacaatctaaaatataaatatcaccatcgacttcgacagcatacatgtttttgccgttctcacggaccccaccaaatggggtaatttgaatttcactactcaattatttcaccttgattcttctaaatgtttaatgttttaaaaagctgagccgtttgttcagtactcaatggtaagattggtaaccgtggttcacccaccggctgacccaaatgatttaaggccgctttaactggcgatggcgatggtgcactaaacaaggcactcatcttgggtgttaagtcccgttgatacttagcggccgtggcaatctcaccctggtcgatggcactaaacatcgccgtcatttcgtcaccatagatatgacttgccactgagataaccccagcaccaccaatttccttggcagccaaactctgagaatcttcaccagtataaacaagaaaatcagccggtgcattttcgacaatcgcgccaaactcttccatcgtcgcacactgcttaatcccaataatattgggattttgtgctaatgttaagatcgtggccacggtcatcttcacaataacccggcccggaatattataaataataactggtaagccaccttgatcagcaaccgctgtaaagtgggcaatcataccagcttgatcaggcttgttgtagtagggaaccaccactaaagctgcatcaatccccttaatctgactaaccttcttagtaaatgcgatggtagcagcggtactgtttgagccggtcccggccacgattggtacccgaccatcgacaatctcagctgctttctttagtaaggttaatttttcatcttcggttagcgttggtgcttcaccagttgtcccacccaccagaataccttgggtgccgtgtgccaataaatgttcaatcaaacttgctaaccgcttttcgtccaattgttggtgatcatcgaaaggggtcaccattgcggtcatcaaatcaacgtttgcaaagttcatgatctaaaaactcctctattaaaatttacaagtaccagcgtacctgttccgattaagtaactctccccagtttaccacattttaaagtaaagcaatagttagaccattcaatgcaatctaatgtggtcgttgctgactaaaatacgcgacccacagcatcaatgccatcagctgtaatccagccgtaacaataaagattgactgatacccccaccaattggcaacaatcacggctaacccggggccgaccacgttaccacaagcttgcgcggactgatttaaactaaacacacgcccaaacgctgcgtgtgggacatgctcgactgtcatcacttgaagcgcggtcaatagtgccgcatccgcaattcccagtattagccgtagcccgaccagccacgtgacctgatgtaccaaactagtcaacaataagtcaacaatcgctaaaatcaaaaaagtaactaagcaacggccagcgcccagccgatccagaatgcgcccaacacgaccagccattagaatcgtggcaagtcccggcgcagccgccacaatccccgtcatcaagataatcgtctgcgccgttgcttggggcgctaactgtccgaccagcaagcttaacagtggtgttatcgcattggtcgtcgcctgaacaactagtaacgatgtcagcaaggcacaaataaagcgaccacccaattgatgtaagattggtcgcaatggtggtaacgtggcgcgactaactgccgtcaccttctcttgaacaccccaccaggtcatgacaaagacaagcgccatcaaactactggtagccacgaacgccccccgatagccaacggtattagccagaaagcttcccaaaagtggccccatcaatgtgccactgatgctaccagtgaccagtttacttaaccactggccacgttgttccgcaggtacggtaatcgaaatcagtgcgttagcattattgatgtaacctgaaaacgctccctgtgcggctcgtaaaatcaagaggacgatcacgttaggtgctagtcccacaccgagaatcgttaaggtcatcatgccagatgcgcgtagacacatcagcttacgccccttttgatccgccaatcggccccacaatggtgcgactaaagctttgcaggcgtatgtcacggcaaacgccgctgcccctagaaaattcaactgggtcgttgaataatcgcctaatgtctgaatatacagcacaataaacggtaacgtcattgcgttacctaaatcagtgattaaactgccaaaccataagacccgaaagttacgagtcaacgttgccattgcttccatgaaatcccctcattcacttttgaataaacataagtatagcgaacggttgtttgggtttaataaagtttatgtatcgtttctgtaattttttacacaaaaaaagaaccacccgcaggcagttctcgtaatctcaatattaacgacgaagaccaagactttggattaagtcacggtaacggttaacgtcttctttacgaaggtaagctaacaagttacgacggtgaccaattttcttcatcaacccacgttgtgaatgaaaatccttcttgtgaactcgtaaatgttcgtttaattcgttgatgtcttccgttaaaactgcaacttggacttcaacagaaccagtatcgccttcgtgacgagcatacttgttaataagctccgtcttcttttcgcgtgaaattgccatgtgtttcaaccacctttccaataattgccctaaactgagtaaatcgttggtggtgcacgaaaaactaagtaaagggttgctgaacacttgatatagtctagcaaactaaggagtaaaaagcaagtttcaatacatatcaagataaattactttacacataacggttgcattcaagccggggcttatgtataatagcatttgttgaaaaaatgatggaggtgaatctgatgccaattatcaaatccgctattgaacgcgtgaaaacaaacaataaagcaaacgtccgtaacaccgcccaaatgagtgcgatgcggactgctgttaaaaaatttgaagctgctaaaactgctggtgccgacaacgtcgacgatttatacttagcagcaactagcgccgttgacaaggctgcttctaaaggtcttatcaagcgcaacaaagctgcccgtgacaagtcacggatggctgcacgttacgctaaataagctaattttacgcccgagcattgcgacggcgtttttttatcgcctttaatgactcaaaagatggtcgaccgaattctgagaattccggtcgaccatctttttttggggctccatatctaagcactattacttttgccttcgtgaatagtcgttctcgcttgtccaacaagccaatgcctaacgggacagccgcgttccgaccgctgcctgtcgctcattaacaaattgaaccataaataactcaaagagcaactccgggtcgcgttgtgtcgttttcatttgtacttctgtttggagcagtcctaagtacgccgcccgtaacgcagcttgatcaaaatggcggaccgtttgcatggctagtttgacccgatatgggtgcactttaagcgtgctagctaggctgccctgactatagcctgcacgcgccataattttgacctgtagcaacaatcggaattgtcctaataagattgcattgatctttagtggggcttcctgagctgccaccagttcatggtaaagttcgaccgctgactgcgtctgataacgaagtacatcgttgaccaaatcaaaaacattttgcgtcagtgatttagtcaccaaagcctgaactgccgctaaatcaattcgttgggattgggctgcgtaaatcatcaacttcggtaattgtcccataatcagtcccaactgcccgtcagttcgattaaccagttcctgtagtgcgtccgcatcaatgcgaatctgtttctcatctaacgccgcttgcacatagcgttgcgtttcagcctccgagacttggttgacttcaaccgtcgtcgcctgtttttttaacgttttaacgagctttttacgcgcatctaatttctcatagggtgccataaacaccagaatcgtacttggttcaggttgttcaaaatagtgctgtagtgaggccagatcatggtcaaccttggtcttcttattttcacccgtcaaaaagtacgggtgattaataaagactaatcgccgttcaccaaaaaacggtgccgacattgcatcatctaaagctacagctactggcgtcgtttccatatcataactgccgacgttcatcgtttgttcttcactgggaatttgctgcgtaaaagcctgtttgagctgatcggccaaatagtcgaccgttcccaagataacatagatcgatgccaagtcaccgttgcgaatcgattttaacgcctgttgtgcgttgatggcgatcaccttcctttaaaaatgtttgccaacgtccctggcgatgattaacgaaacgataggttatcatcccctgcaaagccgttgaataagtgacaatatgctgttcagctagagttattagtgtttcttgattcggatgcccatagcgattgtgccgacccaccgataaaataccgtggtgcacacctaattggcgcaaagctaacggatccgaggctgttttactgccatgatgccctagctttaaaacgtccacgcgtaattgtggatatcgggcaacgattgcacgctcccccgctcggtcaagatcacccgtaaacatgaaacgttgctgaccaaaaacccccgttaacaccaacgaatcttcattttcagcccgtcccggtttaaacggatgcaccgcaaccaatccatctgcaaacgtatggccggccaatgcttcaaccactttaggccgctttctggcgggcactagcagcttttgaaacttggctaggcgcgccattccggcaggtaccaccacttgattgaccggcatcaagcgtaatagttcacccaaatcaccaatatggtcaacatccttgtgtgataaataaactgtatccaagtgagtgatccctagccggtgcaaataattgaccgtaatcgtttccgcacgcgatcgcggttgtacctgctctgcctgccaacgtggccgggaaaagtgtagttgccccccagtatcgatcaaactcacttggcggttaaatggttggcgaatcaagatcgaatcgccctgaccgacatcgataaattgaacggcaccgtgaagtggaaaacgtagactaagactaaaacaagcatatgccagtaacagtccccagtaataccgacgccgcggtgtccgtaacaaccacaaactcaatagactgagcgtccatgcccacagtgtactcggttgaccgataatgagtaggcctggccaatggctgacccactcaagccaattctgaaaattaaccaacacccattcacacacgctggtgacattggtagaaccaaagctaatgctcgcccccacgaccgtcaccggtaataatacccaactaaaaataggcgcaaccaccaaattgactgctaaggaccacagatgccactgcgccgtagctacaagcaaaaccggtaaactgataacctgaatccaaattgctaatcgccacggcggcaaaccaggcattaagatcagcagcaaggctagtccataactgagctgaccacctaattggctcaataccaaaggattatgggcaatccccattataagggcaaggctccaaccacccaacgccccacttgactgatgtgttagcaactgccaaataattggtaaagccgcggttacaactgcccgccgcaagctatcggcaccgccgcccaagacaaggtatgctggcaagagccctaataaccaaatatcgattgcttgctgacttagatgcagtcgtaacaagacccattgcaagaatttaactaataaaataacatgcatacccgacaaactgaacaaatgcaatagtcccagctgttgaacggcccccattgtcgtctgaaaatctgtggggcgtatcccaaccagtagactcgtcgcataacgactaagcgttggtggcaatctttgacaggctagaaagaattgctgacgccattggtgtaatcgatcaagtagccccagccaaccacgccgcgacgcaatttctattcgttgaaccgctgtgaccgttacttggcgggcgatgccttgactgcgataatacctaggcgcattaaactgccccgggttggtaggaggtgcgatggcggcgacttccccctgaacgtgccagatcgtccggtgagtaaactgggtcagatactgtttttcagtggcacttttcagctgtcctctaacaagtactttgcccattggactagtggcaatcagctgatactgaccaccgcgcaccgtaatcgcatcgggttggacagccaaatggcttgtgaccacctgactgggccgctgaacaatggaggcgaaacggtggttttgccagttcagccagattgccaaagataaaacacagccaatcgtcaccatcaaacactgtcgatctcgtaatcggatgactcgcaataaccaaattaataataatccggctgccagccattgttggtcaactaaccaactactaagtaagccgcacgcaatggcagcaaaaaatagtgcacgcaattagtcacgatctaacaagatttgatcaagattcagcttatccaaatctgattggtcgaactgaacttgttgtaaagccacgtgttttcgttcaattaaggacatggcatacgcatcgttatgataattacgtaaataatgaattttttgaattccagcttgtaataacattttcgtgcattgtaaacatggaaagtcagtgacatagatttcagcaccatccgtagctgcaccgaatttcgcacactgcaaaatcgcattcatttccgcgtgaatagtgcgaacacagtgcccatcaacaaggtaacacccctcatcgatacaatgaacatcgccggatactgaaccattgtaaccacccgcaataatgcgtttgtcgcgaacaatcgtggcaccaaccgaaagccgctcacacgtgcttcgactcgccaataagaccgcctgcatcataaaatactgatcccatggaattcgttgatctttcatcattttatgcctcactttcaatgacagtagtataccaaaatgtgcgctttgaaactagacggtgagctggtctttgtatttggccacagtcttttctccaaagccgctgacgtttttcaaatcatcaattgttttaaaattaccatgttgctggcgataatcaatgattttttcagccttcttctgcccgattccgctcaacgtttgcagcgcggccacatcagccgtgttgagattgatcttatccgttgccgcatgatcactagttggtgttccgccagtaggccccgttgactggacgactggtggcgcaacagccggggcctgttcgcccttagctggcacgtagatcacttgctgatcagtcactttggcagccaagttgatctgctgagcatctgcctgtggctgcatgccttgtgccagttggatgacatccgcgacccgcatactagcagtaacctgatacaaccctggtttattaaccgcacccttaatatcgacatacccgggtgaactagcacctgtcggtcgggctgggctcggtgtagcgttcgacggttgggtactcgttgcgggctggtcagcattggcagacgttcgactcgcgcctcccattgatgtggaattgaacgaatgcgccaacaagttatccgtaccggcgggttgaggctgcttaagttgactcagtgcccatcccgttatcaaaataatgatcacggcagtaacaccaccaacaatccgccagtgcattttgagcagcttaatccaatctatcatttgttttcaccccttcagcgaatagttacgcaaaaggagcggctacccatgaaaaaagtttgggttttaccccaaactttgctaacttgcatttcaattttactattggtgtgtctgcaaataatgaacggcctgtttaaatgaggtcactggaacaactttcatattaggcgcgtactttttcgcggtcgctttagcaagttgatagttagtttgacccttttcttcaaccgccaaaagcgctttggttggtttcacatacggtgcaaagaaaattgtcgcccctgcccgcttagcagcaatcactttcttgtcgataccaccaatttcaccaacttgtccattttgatcgatggtgccggtccccgcaatcttccgtccgtgtcgcaaattctgattagtcaattgctgatagatttgcaagctaaacatcaatccggccgagggacccccgatttgtccgggatcaaccttaaccggaatagtcgtcgtcactttaatattatcagttaggccgataccaatcccggcgcggtgcgtgctcagcttgattaggggcgcacttgcttgcttcaaatggccctttcgccgatacgtgatcgtcactcgatgtccgacgccctgcttaccaatataatgctgatacgcactggctgtattaaaatggtggccatcgactttcgtaatcgtatcgccaacttttaactggtttctaaatttcgaattagactgaaccgttaaaacgtagataccctgataaaccttgcggtattgctgatgcgcagccgaatacgccgtcgcgatagcttcgttgattgcacttcgcatataaaacttctgaacccgattataagtcgcgtcatcctgaccgccagtcatatcctgagcactgaccacgtcatagtgcggattcaattgtgcgtaaagccacatcagcggcgtcgctcgagcttctgcgaccgaggtcaacataaacttaccccggtgatgatccggatgccgcttgacggtcacaaaagtcttcaaattgtttgcacttccgggtccttcaatatagtacggtaaaggaattagaaatagtgcaagtaccaccagtatcacgaccagcaagccccagtaacgttttaacaactcccggcccttagtcatgctgatcagttcctaaccgctgatggagtttttgcgccaccgcggtcgggacgtacttggaaacgtccgctcccatcttggcaacttccttaattaagctggaagaaaagtaagcgtacgggggccgtgcaatcaagcaaatcgtttcgatcgtctcgtctaatgacttgttcatccaagcgatatcacgttcatacccgaaatcctgttcattccgcaaaccacgtaccaaaactgtcgcatggacactcgccataaagtcaacggtcaaaccagttgcggcctgaacttcaacgttgggtaaacccgtcagctcatcactgatcatcgcgactttttccgtcatcgtaaataacggttgcttactcgtattgaccatgacggccacaatcaaccggtcaactaatcgactggcacgttgaatcatatccaagtggccccgtgtgattgggtcgaaactccccggaaaaactgctgtcaccataacttacccgacctccgttactttttggtaaatggtaatgaccgtaataccgtaatcttgttgtctgatcaattcaaatccgggtaagaccgttggcaagttcgcattcgtatccgtctcacaaatgacccggcaacccggattcagcaatcctagtgcatcacaatgctgaatatccttcacaatctgttgcttggcatagggtgggtctaaaaacacccaatcaaagtgttcatcttgggatgctaatcggtccaaaatacgctcagcatcgcctttgataacttcaaatcgttcgggggcctttgtaacggcaatgttatccttgatcgtcttgatggcttgatactgccgatcaatcaagacggcccgagccactccgcgtgatacagcttcgatactcaagccaccgctcccagcaaataagtctagggactgcccaccatcgaaataggggccaataatattaaaaacagcttctttaaccttgtccgtcgtcggccgagtttgcatgcctggcacggctttgagccgccgaccaccaaagtctcctgctacaattcgcatttcatcttcaccaacttaatcctcatcatcgtcatcaggcgcaccagtcgtggttggcttaaaaaagccttgatccacacgttcgccaaagttcattgcaacgtccgggcggtatgacggttcaaccctgcggacaaaatttaattttttgattttcgtggtcgcggccggaatttgactttcatccatgtacaagaccacataatgctctttacgcgattggtattgaattaatccaaaacgtttcaattgacgcacctgcttcatcgaatgcatataaacgatgagcgaccggcgcggtttaactgtaaaatccatcgaacctcacctcttctactagcgtttctgtttaaatgttaggctagattcagcatttcgtcaactaagttcttaactacgcagtggtttttattggcgaagcgctgaagctaaaaaacactagtaacctaagccactagtgtttttgcttgaaatatccttattgtggtgcaatctcgagcagtaagtcatccgtctgaatgacgtcacccgcattaacataaatatgttcgatgaccccatcttccggtgcctgaatggttgtctccatcttcattgcttccgtcacaagtaatggctcacctttcttaaccgtttggcccttcttaactaacagtttcagaactgaaccactcatcgttgcgccaacttcatcttcattagttggttccgccttgcgcgtgctggttgccgattggtgaatggcattgtccttgaccataatctcttgattttgaccattgatactaaagtaaagtgtccggacaccatcgacatcgggatcactaatctgattaagcttgacgatcatcgtcttacctttggctaactcaatattgaccgtctcaccgagccgcatgccttggaaaaaggtcggtgtgtctaacagtgatacgtgcccgtagcgcttatggctagcatcgtaatccatgaatactttcgggtacaggatgtagctgagcacttcctgatggctcgcttcatgaccaagcttagccgatagctctgctttgaccgcagcaaagtcagctggtttggctaaactaccgggccgcacagtcaacgctggctggcctttcaagacgatctgctggagcttctttggaaagcctccgactggttgaccaagattgccagcaaagaagttgatgaccgatgctgggaaatcgagcttggtaccctgattataaacatcgtccggtgtcaagtgattttccatcatgaacagggccatgtcaccaacaactttagagctgggcgtaactttgataatatcaccaaacatatcattgaccgtcgcatacatcgtcttaacttcttcccaacgatccccgagaccaacagccttagcttgttgctgcaagttagaatattgtccacccggcatctgcgtctgataaatatccgtttgggggccggtcataccattcgagaagtcttggtagtacggccgtacgccttgccaataccgattgatagcttcaacgttgttaatatcaacatcaggttgccgatcattgtgggctaatgcgtaatacaacgagctcattgatggttggctggtcgtgcctgatagcgcactcgcagcaacatcgaccacgtcaacaccagcttccactgctcgggcataggtaaagattccattaccagtcgtatcatgcgtatgcagatgaactggcacggacagcgcgtctttcaacgtcgatactaattcataggcggcctctggctttaacacacccgccatatccttgatggcaataatatcggcaccagttgattgcagatccaaggccagctgacgataataatcaagattgtatttttgccgatcagggttcataatgtcgcccgtataacagatcgtggcttccgcaatcttcccggtttccttgacggcctgaatactcttttccatttgaggaacccaattcaaactgtcaaaaatgcggaaaacatcaatgccactcttagctgcttctaagataaattcgcgaatcacattatctggatagttctggtaacccaccgcattggaaccacggaacaacatttggaagagtgtccggggcattgcctgccgaagtactttcagccgattccaggggttttcatttagaaaacgataggccacatcgaacgtcgcaccaccccacatctcataggagaataactgtggcaacgctttttgtgaagccgcggcaacggctaacatatccttcgtccgcatccgcgttgcaaataaactctgatgcgcatcccgcatggtcgtatctgttaataacacttgcttctgggctaacaaccactgttgtaatccctggacaccttgttgatccaacacgtcttttgccgtgacgatgtcgggtgcgatcggttgaaaatcatccttaaactcaacgtccggatagtacttcttcgaatgttgggcaacgtcagcgaaaccattgaccgtcacattcccaatatacttcaacatcttatcttcacgttgcgtatcgtcagggaatttgaagagcgttggggtctgatcaataaaccgggtccccgcttcacctgcttggaacgttgggttgtcaatcacattcagcataaacggaatgttcgtcttcacgccgcgaatatcgaactcaactaggacgcgtcgcattttatgaacggccgctttgaagttccgcgccgcaacacaagcctttacaagcagtgaatcaaaataaggcgttacgattgcgccggaataggtattaccagcatccaaacgaaccccattaccacctggtgaccggtacgtctcgatgcgaccagtatctggcataaaatcatttgcgggatcttccgtcgtaattcgacactgaattgccgcacccttatatgtcaatgcgtcttgatgtggtaaccgtaaatcctcgaataggtcaccacccatcgcaattttgagctgagcatggacaatatcgatttcggtaatcatttctgtcaccgtatgttcaacttgaacccgcggattaacttccatgaagtagaattggtccccttcaaccaagaattcaaccgttgcggcgtttaaatagtgtacactcttcatcaagtcgactgcggcgttacagatcttttgacgcaactcgattggcagggccacggccggtgcaaattcaatcactttttgattacggcgctgaacagaacagtcacgttcaaataaatgcatgacattgccgtgagcatccgctaaaatctggacttcaatgtgtttgggattcgcgatgaatttttccaagtaaatctcgtcatcaccaaaggattgcatggcctctgaacgggcacggtcaaaagcttcttgtaattcagaagcttcatgaacgatgcgcattccccgaccaccaccacccatggcagctttgatcataattggataaccgtattgctgagtaaactgtaacgcctcgttcaggctagtaaccgggtgtaaggtgctcggaatcgtctgcacgccggcatcgcgagctacacgtttggccgtaatcttatcaccaaacatctcgaggtgctctggcttaggaccaacgaaggtcatgccttcttcagcaatccgccgagcaaaagtagcattttcagataaaaagccgtaacctgggtgaatcgcatccacatgattttctttagcaatgcgaataatatcttcaatatccaggtaagccgcaatcggcgccttaccctcacctactaagtacgcttcatcagctttaaaacggtgaactgaaaactcatcttctttggcgtaaatcgcaacagtctgaaggcctaattcgtggcaagcacgaatgacccgggtcgcaatttcaccacggttagcaattaatactttcttcaccaaaatccctcatttccaaataaaatcgtcttagcctgcctgtcgaactgtattaaggcgcgccattttttcaagtgcactaatgtttaataccaatcctagtgaaagcgtcaataccatcatgctagaaccaccataactcatgaatgggaaggtcaccccagtaatcggaatcagaccaacgatcccacccacattaataaatgcttgaatggtcatgtaggctgcgacaccgtaacagaccaacgcgttgaacgtattagtcgcacgaaccccgatatagatcgtgcgcatcacgatgacaagtagtaagcccattacgattaaaatgccaattagtccgagttcttcggcagtgattgacataataaaatcagtgttcggttcgggtaaataaccacgtttttgcaaactattcccaatcccaacgcctgtcaaaccaccgtttgagatggcatagtaagagttgactaactgtgtccccgctcctgaagccgttttaaacggattcaggaaaccgagaaaccgccgtaactgataagaatttgcaaaagcactttggggcatgcgactcactaaaggcactaaaatccattcaaaggcagcgaccgccccagcaaagacaccaacacctacaaagtatgaaatgccactcgcaaacaagataaccgccgcgatggctaaattaatcgtggccccaccaaggtcgggttgcacaaaaatcagtaaaatcatcgcgaacaacatcacaaactgagcacccaattcacggattcgagccaccccaaaatgtgcctcccgttgagaaataattgatgccaagtaaatgatcaggtaaaacttgcaaaattcagctggttggatcgagactggtcccaaaatgatccagccagccgccccattaattgattgaccaaccaatcggaggagaaccagaacaaataacatcgcaaaccctaacataccaagtaacttggtttgcttaaaatagtcgatcttcaaattcatacaaaccaaggtgatcactaagcctaagacgacccagatcagttgtttaactaaataaccggtgggtgtcgaaccgttttgtgcggctacgtatgaactcgatgaatagaccatgacaacaccgatcccgctgagaatcaaatacgggataaacagcacatagtccatatagtgtaactttttccacatgagcttaaatcccaccctaattaatatctcaattcggattatcccccacaataacgcgaactgtttgcttgcaacaattatagcataagtcgattttaacacagcattttcacatattaatttgttgttttttaatcaagtttggattactgatttacaaactagtgcgtttagcctcattagtaaccggctggccaacgcctccaaatcagtgtatttcccttaataaacgtacctagacaatttgaacaacccgcgccgttccggcacttgacgtcggaatgaatttgtcgcgcattgccacccataacgcgataagcgcccccgcaagagccaacaatcgacaacgtgaacgataaaatagccgtggtaagccctatttaggacccaccacagctattttggattgctaaccgctcgttaacgatcgctttcgtgtcacgcactgggacgattgcacgctcactcggactcatctgccgcaatcgcggctcgcaacttacgctgataccaatccctaacacgccggacattcgcaactgcccgttcaaatgagaatgcgcccagtaatagcaggcacggtaagtactgaattaggtaccgactccgaccaccttcgaacaagaggaggaagataaacccaccaatcatcgccaaccggagcaattgaatcaattgccagcgcgggccaaaacccaacgcgataatcacgagtagcactaaccaccacagttgcgccacaaaccgaaaatctgcaatatggcgaccgtataaataaataaagttttttaaccaattactaaagccctggttgcttggtttttgattttcgcgaaagaaattgccttccttcaaccagccaaaggtcccgtcagcagtattattgcgttgcttttttaccaagaattcaaggtaaccccacggtcccagtttcttgagctgacgcttcagcatcttgattgagtaagccgttttttgtgccttggtgggcaaaacggccatctgtatcgcctgcttttcactatacccgccggtgccgtaaacgcccatggccataaaatgaatcgccggaatcgaccttgatttatcgattttgatatacgtctggttctggatggcctgattcgtataatgataagtgaggccggcactttcgagcatcaagattgccatggcgaccgtcacaaaaatcatcatcgtttgtgaaccctgccgcgaccgcaagcgtgctaaaaagctgatgatggcaatggcgattaccggaataatggatgagggtttcatgaagtacgttaatgtcacactcacgccaaacccgacggcggcggccacacgcagtaacggcggtcgcttcgtttgactcatcacaaaatagcacagcatgaaaaacgaaaccagcggcagtccccaagcatccgtatacggcataataatacttggaaaaaccgccaaccaaccggcgtgcagatacatagcgattcctaacgccgagcgtcgtaccacaaatacgctcattaaattgaaagctgctgaaagatcgacaaaaaacagcgtcacgtaatcaaaaaattgccacgaagtttgaccagtcacttccgatagccagtgcataaaaagcatgattggcatgttgttttgattaagactgtaatacgccgtcacgcccacctcctggacgtgtttcgcactggtagccgcatagtggagcatcccagcgtcaaagccactgacgggatggacaaatgtcacgaatacgagctgaccaataaaaacaagtgctaacaagacaccagccgtccggagctgatttgtgattagtagtcgatatagcacccgatgaacgcgcggatacgcatagttcataatcaacacggcgacaatcataataatcaaccccgtcgtcaataaggtcgtactcgtcccaaacgtcgcgttatcccctaaaataatattcggcgacattactgcaaataacaacattggtgcaaatagtaaccaccaaacgctcgtaatcatcttctgactaaattgataaaaataacgtctcatcattaatctacttcgtttgaattcttgcacctgaactaaacaatcaagatattccgctaacttcgcgtgatatcttgtagtcagccaacacgtgccgcttcaactcattttcctttccggcgtcgatagtgattgtggattgtacgcctatcatcacgtaagacggccaacaaccgttgccattcttcggtgaacccccgcattttccaagttgcctgggtcgtcatcgcattgataacaccaatcaatcgaatccaagctgtcaaaaacatataaagtggcagcgttaatgttagccaccataaatgcttgtagaaatggcgttcttcaggatacggctttaataaaataccaacactaataaagttaataacccctaccatgacgtataaactatagatcaagagatatgagagccccacgaccacagttgaatagccaaaagcaatcaaaacaatcgtcgcaaaagtccaaatcattcgtggaaacgtaaacgtgtgatcaatcataattcgccgcaccaaaaattctttgaaaaagcccttgatgctagctgtttgtgacatataatgttgtgcaacttccagttcaccacgttgccagcgctggcgttgcgtatataactcggaaaagcctgaaattggcgccacataaaaaatagcatctgcacaaataacgacctttttgcctaaacgtgtccgaatctgaaacgtcatgtccgtgtcctcaccgattgtatcggtgtcatacaagaaagtttccattaacacttcccgtcgaaatgccgagaaagctcctgacatggtaaacagctggtcacggaacgactcgatggtacggccagaaagaaaagcctgtgcatattcgtaatactcatttttagccaacagccgatgccaccaaccatgaacttgcttaaccaagtttctttgtgggagcactgccccggtcatggccgcaatctgctcatcgttctcgaaccgtagtaccatatttttaatcgcgttgggttccaataaaccatcactatcaatattaatgacataactaccaatactctcgtaaatggccgcgttaagcgcgcgagctttccccttgtcagtattgacataccgtaaaaataaattaggaaacgcattttgggcgcgtgcatacgccccaaaactatcatcggtactctgattattcgccaaaataatttgcatgctttttttatcatacgtttgatgatcgatggaacgaatgcagtcaaataacgtatcttcagaattataaaccggtacaatgatggttacccacggccacttagcaggcgctttaagccggggcatgtggcgatgtagtcgcattaacttaatagtcgacataattgccggaataatttccaccacgatcggcactaaggcccaggtaatccaaaaccccattctagtcagcgctaagtttatccagtacatcacaggattcgctccctccaatcaataaactgctgataaagtcctcgagctaactgtgaataggtaaaaacattgtaatataagacaatgaccagaacatagaacagtaaccgcccaatcactgaatgagccagaaagaatgtttgaccaccgccaaagtgaacaatcacaatcaccacggacaggcgtaatacattaatcaagtaaatatacaacaatccaaaaacaccataaaacaccttttcacggcgctggtaagccgggtaaaaggctactagcgaaataaatgcacacgtctcaatgattcccgagcattcataatcaatcgacatgattaccggattaccactattaataatgtagaccaggcccattttgaacataatactgcaccaaccggtgatatcactaaacagcgctaccccatgaatcacagcgtgggtaaaaaaccacacccaatacggacgactaattgccgtcaagataaaaaagagcccggcgcttcccacaatgaagtagaaggcagatagccgagcccgtttgagcactgacagtccgtataaccatatcacaatccctagtaggatctttacattcatcgtacatcagtcctattaattagcttaccgacgcgcctaagccgccggtggttataaattgattgtcagtaaattaaatatcattagttcaatagttatcgattcaattcacatcgtgcaagttaatctatctttaatcatgattaaaacgtgccaattttagattcctgttcgtcagccggtgcgcgtcctattccgacctacggggctgggtgacaattgctggaacgcagccgacgtcgatttgagctaacgcataacccgcgtcatctcaaatacgagtcttattctaagccggaagaaagacacttccgactaagaataatttggctactgagcattgtcacccagcccctccggtcgggaagccgctcgaatggctaatgaacgaccatcgaactcggtacaatttgtcgttgactattttgatactggaattttaaacaaagcgttaggtgtattaagcactccgtcaagagattaaatctcactacaacaatttaggattagtgagctatctcaatatcattttcagtctgacagttgattgacaaaattatggtttatgaaaaacaatgacgaattcaccaaaagttgggtacgcacatgtccgccattcgaacactgtcccgactggaaggcgtttcggccaatgctcagcggtgaaattccacttagcaagcgtccttggcttggttagtggaagaccagtatttaagacgtgggttgcggcttaaatctgtgtccaccgcgttccagcaattggcagaaatgcctggaagtcggcttaggacgaaccagcaaaacaagtttacaccaactcgtatctatttccagcgggtttaagctggctgcttctgaatttaaaggaacagcacgttttaatcgtggttaatgctaaataataacgagcacaacatgttatcaatcatcagttcttagtggtcggtaaatccgttgcagttaatcgacgccgcttgcggaatttaaagtatccccaagcaacgattacgacaccgacaccggaaattacgtacggaccagttgagcccccggccacggtcattttttgattaccgatattcggattggacatcgtaatcgtttggccggtcatcgttgaaatatcgaacttgctcaagtccactcggaattcagcaatcgaatgtgaaccggcttgagaaacatacccgttgccgaccgtcccgtactgatggccctcattgtacttaccacccgtaaatgagacagctttgaccgccccgtcactttgcgagctaggcatctcattggaccacacgtaatacttctgaccaccaatgtcgaaattataatccccgtaaccgggaacctgtccatacttcatcttgacataaacgtagacgtactttccgtcactaaccattgccatataaccgttataaccctcggtcaaagtcacgttcttccaatcattaaagttaccatcgattttaatgttgagattatcattgtcattggctgcattattgtccgtcgtcgaggacgccttggaagagaccgtgcttttatcagtaattaccccagctgagctagttgctgaggaactggctgcactactggtgctagtcgtagaacttgaactagttgtagaattcgcatttgtacttgaactggtactactacttgagctagttgaagtcgacgtaattgttccaacagtgctagtcgtagagtcactaccgatattcggattgaccatcgaaatctgcttaccactcgcactgtcagttaatcctaacttggttaagtcaatctgaaattcggcataattatgcgaaccgtcgttggtcacatatcccgtcccgacagttccatactgagtaccatcgttccatttaccaccagttaatgtgaaggacttgaccgttcccgagctaacactacctgaaatattcttagaccaaatataatacgtcttaccatcaatagtgaaattatagtcgccatatcctggcacagcaccatttttcatcttgacgtaaacattgacatactggccagcactcgtgagtgccgtgtaaccattatagccctccgttaacgtcgcatctttccagtcgttcatcttgccatcaatggtgatgttggcgctagcatgcgctgcggtcgtcatttcaggattgatcattgttgcccccgttaccccaaaaacgagcatgcctaagatcatcaacttattaatttttttcacgatgatcacacctcccaagttcaataccattttaacgggtaacgaagaccattagactctttttaccctataaactaatactatactctggataacaatttatcaatcattatttccatctaaatgaacccaataaccattaatgggacaatatttgagttggtgattaaacgactcctcttcaaaccgctttggcggatacagccttaggcatgccagtaccaaaaaagcacgccctattaaggacgtgcttccaagcaatcaacttacttgttcattttacgctttttagcttctttttcacgggagttcgtgttcaaaatgcgtttccgcaagcgaacatgatctggcgtaatttcacagaattcatcactattcaagaattcaagcgattcttccaatgtcaaatgcgttggtgtcttgattgtcgccgtcaaatccttgttagaagaacgcacgttggtcatgttcttacccttagtaatgttaactgaaatgtcattttcgcggctattttggcccacgatcatgccttcatatacttcggtacctggatcaacaaaaatcgttccccggtcttcgattcccattgtggcgtatgtcgtggtcttaccctggttgattgaaaccaaagcaccgttacggcggcctgggttccagttaggaataactgggaggtattcagagaaagtatggttcatgattccgtaaccacgtgtcaatgaaaggaattcagttgaataaccgatcaagcctcgtgaaggtgctaagaaagtcaaccgggtttggttattaccagtactttccatgttcttcatttcagccttacgctttgataaggtatcaataattgaaccagtatattcgtctggcgtatcgatttgaacagattcaaatggttcgcaacgcttaccatcaatttcgcgatagataacttctggacgagatgcttgtagttcataaccttcacgccgtaacgtttcgattaagattgacaaatgcaattccccacgaccagaaacgacccatgaaccaggttcgtcagtatcatcaacccgaagtgaaacatcggtttcaagttcagccttcaaccgcatttcaagttgacgggcagttacgaacttaccttccttacccgcaaatggtgaggagttcgtaccgaaagtcatttgtaaagttggttcgtcaatccgtaagattggcaaagcttcaggattagctgaatcagcaaccgtttcaccaacgttgatatcttccatcccagaaacagcaactaagtcaccggcgtgggcttcattgatttccaaacgttgaagaccaaagaacccaaacaacttagttacgcggaaatttttcttactaccatcgagtttcatgacagaaacactgtcaccaaccttgatcgtaccacggaagacccgaccgataccaacccgaccaacataatcgttgtagtctaataaggccacttggaattgtaaaggttcgtcagagttgtcaattggtgatgggatcgtcttgatgatcgtatcgaagattggttgcatcgtatgttcctgcttagcaggatctgattcataactagaagtcccatttaaagctgaaacatagaccactgggaagtctaattgtgattcgtcagcacctaattcgatgaagaggtctaacacttcgtcaacgacctcttcaggacgtgcaccggggcggtcgattttgttaataacaacgattggtgttaggtgttgttccaaagcttttttcaaaacaaaccgagtttgaggcatcgttccttcaaacgcatcaacaacgagtaataccccgtcaaccatgcgcatgattcgttcaacttcaccaccgaagtcagcatgtcctggtgtatctagaatgttaatttgtttgtcgccgtaacgtacggccgtgtttttcgaaaggatcgtgataccgcgttccttttcaatggcattagtgtccatcgcccgatcgtcaatctggacatgttcgtcaagggtatccgattgtttaagcatttcgttaaccaacgtcgttttaccgtggtcaacgtgggcaataatggcaatgttgcggatatcatctctaaatttcaaaattgatcttcctttcatccttcaaaattctgactatcttcgacagcagaaatcttacatatattaatacaatccgccgttactatcaagtcatagcttcaacttgaaaccttcataacgacgttttcagcggctttcatccattgacataaaaaaactgtgacatatgggtcacagtcccactacttactagacgattgccaaaattgagcgttgtgcgcgctttgtcgctatcagtacatcacccgatgataacatattaaccgggttgccgtcaactctagacacaaccaagccaaggctttccgcgagaacgcgaccagccgcaaaatcccatggtcgcaagtatgacaggtagccgaccagttcgcccgctaagacctggctaatttgaataccagcactacccataatccgtggtcccagtgatttggcaataatcgtctgcatattgaagcggtcttgaattagtaacggcgcactcgcaccaaacagccccgcactcagatcaacatccgcgggtgcagccagcaattcaccgttaagcgtgacgccgacttcaggaccaccagcatataatttattcgccatgacatcaaagatatatcccagtgttggtttaccgtcaacatacaagcccaccatcatcgcaaaatgattacgctgatgcacaaaattcatggtaccgtcgattgggtcaacgatccagacgtgaccattcatatcagtaacttggtcgccggttccttcctcagctaaaatcttcgcaactggatccaaggctcgaatctgacgcaccaaaaaatcttcattgctatgatccacgttagtgaccaaatcacgccgactcgtcttctccgcaaccgtcaagtgggtgcccatcttcgccaacacttgcgctctcgcagtttgcatcacgacttgcattttctgatttaactgtttcaccacattcgtttgcacgttaagtcacctagtctcggtattgaaatcgctgcttgttagtttcctgagctgcgcgcattgtttgataaatccgataacctgaagcagcctcataatcacgagccagtcgtttttcttccgacttagccggaacgaccgtcttaaaatcacgataggctgccaacaagtctgctgtagcgattgttccttcattagcggcctcgatggcttgataaaaggtcgtaaccttaatgatctcggccgtggtccacgtctcatccagtggatattggtaattatcattgtgtttagacatcttcatccaactcccccgccgtgacccggtcaagttcctcttgaacctggctcgcaatctcagcgtattctttctgctcttcatcagatagcaccatatccgccattcgtttgattccattagcactaatcagtaccggtgatgataatccaaccagctggtcgtcatcgactggtgtttggatatttgtgacggtaccgataaacggtgtctgggcgtaaaacgcattgagcacttgtactaatgctaacacactcaaggtctgattagtaacaatcgtggggtcgtcgatctgctccgtcgctgcactcatttcgtccatcccaaaactaatatcctggttagccaaataagtcatcacgggcgccggcccaatatatgaacgactccatgagatcaggtgtgtcgccgcagttcccactacgaatgcgcggacatccgccgggccgacacttaattgctgacgtagtagttgctccaataaacgactctgcggcaaagtacccaatccgaccactttagaatgatcaatgccactgaaacgcgcagctaagacacttaaaaccgcatcattgctaccagccaaaataatttttccgttaaaaccagcgcccatcgcatcattcacaaacgcgcgaaatagcggcaaagtcgcctttaaatcaccactggcatcacggtcgcttgccaatggcactaaatttccaataatcaagctatctgcttgcgaataatccggcttagcttgcgccactagtgtaaactgacgacaagttaaactcgctgttaccagtgcttggtagcgcggcgcttcttcagcacccgttgcgaccactaatttcactggcaaatctttggcaattgcgactaatattaattgttgtacgaactcgaataatccccgaataattactgtattaatcatttcaatccctccaaccttcgataataattgtacctgagctgtcaatgaattcaagtaaatgttaataaaaagcttactcttttgtaacatttttgcgtaaccaattggtccacttccccccgaagcaaacacattttgatatgttattaatatagaccactacatgctaaaaagttagcaatttgaataacaacatccgcatcaggttcaaaggcgtcacttacggatcagctgagtaatgattaacaagactgaccttcattgcgcctgacagcgcgttaagttacgtttttacgtgactatcttgactggtacttcggtaatccatactggctgcaacatcctatgtaaaataaaagtttgagactcacgcctcaaacttttattaagccatcatccgctttagatgtgcgttgggtaacccatcgcttcatccgccgcttcttgaactacttcacctagggtcgggtgtggatgaatcgtcaaagcaaggtcttcgacattcatcccaccattgaccgcaacgcttaattcagaaatcaaatcactggcacctggtccggcaatttgggcgccgacaatggtgccttcgtccttcgtactgacaagacggaagaagccgtccatggcgttcaacgagattgcacgaccattaccagcaaatggaaacttcgacgtcttcacctgcaagccggcttcttcagcttcagccttcgtcatgccaactgttgccaattctggatcagtaaagcaaactgccggaattgaaacgtagtcgttcgccgtcttcttgccactgattgcaccagcagcaactttggcttcagcaaaagctttgtgtgccagcgcagcaccggcgacaatatctccgattgcgaaaatatcctcagcggccgtccgcccctgttcatcaacttcgatcaagccgcgcttcgttaacttgacgtcagtgtattccaagcccatgtcgtcagtattaggccgccgaccaaccgtgaccataacatagtcagcatgaatctcagtttctttcccgtcgacagcgtaggtaaccgtaacgccactatcatcttgttcggagtttttagccatcgcattagtaatgacatcaacccccttcttcttaaagctgttcaagacaagcttgaccatatctttttcgaagttaggtaagatttgcggtgtcccttcaagaatcgtcacgtgagcaccgaggttggcataggcaccagccaactcagaaccaatgtacccaccaccgataaccactaattctttaggcacttcgggcaaattcaagccacccgtcgagtcaacgacccgaccactgaacttgaagcccggaatttcaactggccgtgaaccagttgcgatgatcaaatgtttgaatttataagtctgaccagtatggtcaccattcatcacccgtaaggtatgattatcatgcatataggcttccccacggaccacttccaccttatgcttcttgagcagcatttcaacgccaccagtcaaccgatcaacaacttgatggtctttccagtcctgggtcactttaaaatccaacaccggatcctgaatatttttaataccaaagatcttactgtccttggcttcttgtagccgatgaccagcactgatcaaagcttttgatggaatacaaccaacgttaaggcagacaccaccgatatattccttttccaccacggtgactttttggccgagttccgcggcccgaatcgcagcgacgtaacccccagggcccgcgccgatgatcattgtatcgcgttcttcagcaaaatctcctacaaccattctgacctcatccttccatcaaaagtaattctggatcatgtaacaattgcttcaataagttcattgcccgttgtgctgttgcaccatcaatcagacggtgatcaaaactcaaggacaacttctgcatcttaccaacaacgatttcaccatcgtcattgacgtaaggttccttaccgatacgcccaacacctaaaatggcaacttccggttggttgataactggggtaaaccagccgccaccaattgagccaatattactaatagtaatagacccaccactcatttcactggcctttaacttgccatcgtaagctttttgcgtattgtcagtaatttctttggcaattgcaaacaagcccttaccttcagcgtgcttaatatttggcactaacaatccacggtcagtatcggtagctaccccaatattgaagtagtgtttgtaaacaatttccttgtttgcatcatcgatcgacgcgttcaattctgggaattgttgtaaaaccgcaaccaaagctttcacgaagtatggtaagaaggtaagatggatgtcgcgatccaaagcaacttgcttgtacttcttccggtgtgccatcaacgcactcacttcaacttcatcaaataaagtaacatgtggcgcggtgtgtttactgttcaccatagccttagagattgccttccgaattggcgtcatcttttcacgcgtctctaattcaggtgtgtcagaaacatatggtttaactggtgttggtgctggtgcttcacttgcagccggagccgttgtcgctggcgtagctgccggtttagcacccgttgccgctggcgcacccgtgtaattgtcaatatcttgctttgtgatctgaccatgggcaccagttggcgtaactaacgtgatgtcaatgtccttatcacgtgcgtactggcgcactgatggcattgccaagacccgtttattaggattgcccgcagccggggttccagtcggttgtgctgatgttgcagcgggagtttcagctgcttcacttgccggggcttccgtcttagtagccgctggtgtttcagccttagccgctggcgcagcgtcgccagaaccatcgtcaatcgtgacgatcacatcaccaattttagccgtttcaccttctggaactaaaatatcaataactttaccacttactggcgatggtaattcttccaccgatttatcattttgaatttcaactagagaatcgtcttctttgacttcatcaccaggttttacgagccatgatgcaatttcgccttcttcaagaccttcaccaagctctggtaatttaaactcgtaagccattggataacttcctttcatgacagtctcaggtgactgtttttcgatgccgcgtcttgattaatagttcaagatttcgcgggtttttgcctcaatttcatcttcagctggtaaccaatcgtcttctgctaatccgaatgggtagaccgtatctggtgcgtacacccggccaactggggcactgagataaagcgcacctttttcagcaatcagtgaagcaacgttcgcagcaatcccagcctgtcgttgtgcttcttgaatcgcaacggcccgaccagtcttttgaacagacttgagaattgtttcttcatctaaaggtgacaaggtccgtaagtcaacaacttcaacggagattccttctttttcgagcttttccgcaaccttcagtgactggttaacttgtgcactgtaagcaatcaaggaaatatcagtaccttcacgaaccacgtttgctttatctaacggaacggtataagcttcatccggaatatccgccttcattgaccggtataacttcaagttttcaaggaagaaaactggatcgttattccgaatagaagaaattaatagccccttggcatcgtaaggattagatggcgtcacgacccgcaaaccaggaatttgagctaaatagccttctaatgagtccgcgtgcatttctggtgtatgcgttccaccaccatatggtgatcgaatggtaatcggcatatgccgagtgccacctgtccggaaacgttcccgtgacatttgaccagcaattgaatccaaagtttcaaaaatgaatccaaggaattgaatttcagggattggccggaaaccttccaatgccagcccaattgataaaccgccaataccggattctgctaaaggagtgtcaaaaacacgatcttcaccaaattcggcttgcaggccatcagttgcccggaagaccccaccgtttttaccaacatcttcaccaaaaactaaggtcttttcgtctgacccgagttctaatcgaagtgcatcggtgatcgcttgaatatacgttttctttgacatgttacttcgactcctttgcttggaattccgtaatttgttgttgaatgttttgtggttgttcctcaaaaacattccccaagaattcggtcattttttgctttggtgcttcatctgcttgtttaacagcagccttgatatcttctttaacttgttcaacgtattcgttttcttgatcttctgaccaaacaccttgatcagtcaagtacttacggtaacgaatcaatggatcattatcgaaccaaggttgttcttcgtccttagtccggtaacgcttaggatcatccccagcattcgtatgcgggccaaaccggtatgtcagcgtttcaatcatgacaggaccgttgccagcagcagcgtattcccgggcggcctttgttacttcataaacagctaggaagtccatcccatcgacctgaacacttggaataccggcagcaactgctttttgagccaacgtcttcgcagctgtttgcttgcgccgtggtactgaaatggcataaccattgttttgaacaatgaagacggccggtgcttcgaaggctccggcaaagttcataccttcatagaagtcaccttgcgaagtcccaccatcaccagtataagtgtaggcaactttgtcttcggtaccgttctttttaatccctaaagccacaccggcagcttgtacgtattgagcgccgataataatctgtggtggcattgcatggaagtcttctggatattcgttacccaagacatgaccacgagaccacaggaacgctttgtaaacaggtagtccgtgttgaatcaattgtggaatatcacgataagcaggcattaaaacgtcggttttcttcatcgcggcgttactccccatctcactggcttcttggccctcagtcggcgcatagaatcctaagcgtccttgccgtgtcaaagcgttagaacgttgatgtaacgtccgttcccataacattaatttaaagaattcaacgagttgttcgtttgaatatttagagacaatttctggtttaattactttagcttgaccatccaatacttgcacgggctcaaagtctttcccaagtgcatcgcggatcgcaccaaaatcaacaattggtttttcgttgtccataaatgacacatccctttcatgaacgtacaaacgttgtgcatcgcaccgcgttcgtaatcgttttcataattacaagtctaatttaccattgcgtttcatcttttgcaagcccttccaaagagcgaaaagccggctttttctgtccaaatgattgtgaactatttaatttgtgcttaattctgttttcatctttttcataacgggcgctactttttggcgtaggcttatgataaactagatattaagtgtaaactgcgcgatcttaattttggaggtaattggaattgattaaaatgcgcgacattatccgcgaaggtaatcacacgttacgcgcggaagcaaagcaagttaaatttccgttgagtgaagctgatcagaagttggccaatgacatgatggaatacttagaaaacagccagaatcccgaattggctaaaaaatacggactgcgtgccggtgttggtttagctgcaccgcaagtcgacgtttcggaacaaatggctgctgtccttgttccgagtgaaaatgaagatgatgaaccggtctttaaagacgtcattatcaatcccgtgatcatcagtcactccgtccaacccggcgccttaactgaaggtgaaggttgtttatccgtcgaccgtgatattgctggctacgttattcgacacgatcggattacgttacgctactataatatggctggtgaagagaaaaagattcgtctcaagaattatccggccattgtttgtcaacatgaaattgatcatcttcatggtattttattctacgaccatatcaatggcgacaatccatttgccgctgatgatgatttagttctaatttcttaaagtcatttaaaaaagcagtcctgaaatgttcaggactgcttttttggtgcactcgaattcaaccgacgcaaatcttccaaatactctaaagtggcctcattcatcaaataggcaatatctaagtggagctgtccgctgcgcagccacgcatcagtcactcgtaacgctggtccagcttcccggaaagcaaccacctgattgtgaattgcgtacgcttgcaattcgttattgaataatcgccgaacttctggcaaatcggccgtgaccatgcctggtgcatctagcacgtactcaaaggccatcacaccacgcccccagacgtctgcgacgggcaccgaatgaatcgcccccgcaacctcttgaatcgtcatcgcatttgcgagcactttgaatgctgctaccatcgcactatcaaccgttcgttggccagcccgccgaatcttcaacgccgcacgcttcagcacttgccgtcgcagcaattcataaacgacgattgccattagtaccccaccaatgattgttaaccaactctgcatgctcaaccctcaattctttttttgtataatgattcacaattttaggaatttttcattttattacttatgtttagcatagcatgtttcatcaaaaaaaattcttttaaccgctctatttttgaagaaagttaacattgtatacacccatctcaaattatgctaaaatgtaagataattgttgtgtttacacaacctggtgtacggatcaaacttttatttttgctatctatttagattacttagtatctaaataaatcttgtttatattaaggagttttacgcatgatttacaaagtatattaccaagaaaccaaagaacggaacccacaacgggaaacgacccaatctttgtatctcgaagccgagaccgaagtagcggcacggaccttagtggaagataatacagatcacaacatcgaatttatcgaaccgttagaaggtaacttcttggattacgaacaaaaaaatccagagtatcacctaacggagttcaataaatgaaacggttaaacgtcaaaaataacgaaaccgctgtttttgcagtcggcggtttgggagaaattgggaaaaatacctatggtatccaatttcaagatgagattattctgattgatgccggaattaaattccctgaagatgaacttctcggaattgattacgttattccagactattcttatctagttgcaaatcagcaaaaaataaaagctttagtgattacgcacggtcatgaagatcatatcggtgggattccattcctattaaaacagatcaacgtgccaatctatgccggccccctagccttagccttgattaagggtaagttagaggaacacgggttattaaaaacaactgaattacacgagatcaatgaagatacggtgctcaagttccgtaagacgcgtgtctcgttcttcagaacgacccattcaattcctgatacactgggaatcgccgttcaaacaccacctggcacgattgtagagaccggagactataagttcgatctgacaccaattactaaccagccgccgaaccttcaaaagatggcgcatctcggtgaacgtggtgtcttggcgctaatgtcagacagtactaacgccgaacggccaatctggacgaagtctgaacggtgggtggcgcaatcaattcgccacatttttgaacaagttgaaggtcgaatcatctttgctacctttgcttctaacatctcgcggattcaagaggcagcgcaggtcgcccttgaacatcatcgtaaaatcgcggtatttgggcgtagtatggaagcagctatcgtcaacggacgtgaattaggctatttaaacatccctgacgaagccatcgttgatgctaacgatttacgctccctccccgccaataaagtcatgattctatgtactggttcccagggtgaaccaatggcggcgctctcgcgaattgccaacggtactcatcgccagatttctattgaacctggcgacaccgtgatcttttcaagttcaccgattcctggtaatacgttaagtgttaaccacgtaatcaacgaactcgaagaagccggtgcaaatgtcattcatggtaaagtcaataacattcatacatctggtcatggtggtcaggaagaacagaaactgatgctacggctgatgaaaccaaagttctttatgccgattcacggtgaatatcgaatgttgaagattcacaccgaactggccgaacaatgtggtgtgccactagaccatagttttatccttgaaaatggtgatgtgcttgcctttacgaaggattctgcccgggttgccggtcactttggtgctggcgatgtctatgttgatggttctggaatcggcgatattggtaacgttgtgttacgcgaccgccaagtgctttcggaagaaggtttggttgttgtcgttgctaccatcaatttgaacaaaaaagagatccaagctggtccagatattctgtcacgtggttttgtctacatgcgcgagtctggcgatctaattaacgaagcccggcggcatgtcttccgtacgatccggcgcaaaatgaagtcggataaagcaaccgaagcgactatccgcaatgcgattattgacgacctgcagagtttcttatttgataagactgaacggcacccaatgattctgccaatgttgattatgaactaactacttgccggaacgatctcgttccggttttttatggtgtaagactgatatgaggtgtaattttgattgctgaatactacattattattaatgaactggcaggatctggtcacggtaaggtcgtttgggaaaccgtcaagccgattctagaacaacgacagattcgatttgaatatcgaatttctgaatatgccggccacacaattcggctcgcaaatgagtacgttaaaaccattcaacgacgaccaaacgtgaccccggtcattctggtcattggtggtgatggcacactgaacgaggccttgaatggtattatgcaggtcccacaagctgaaccgatcccgctcgcctacattcctggaggttcgggcaacgactttgctcgcggtctgggtatggcgactgatccagcaattgcacttgcacaagtactcaacaatatgcggccccgttcgttaaatgttggttatttccatgaaaccttgaaaaacgaacaccagtatttcgtcaacaacgttggtttaggatttgacgctcaaatcgttgatgacacaaaccgtagcaaaaagaagggccgtctgggtcgttgggcttatctcagtaacatgctggccgcatattcccaacaggaaggcttcccgctaaccgtacacgttaaccggaagcgagactattataagcgggctttcctttgtacagtctcgaacattccatactttggtggcggagttaaaattctgcctcaggctaatctgcacgatgatcagctcgaattaatcgttgtcgaagagcctcactggtggattatcctctggttgttcgtcttactgctactgggtggccgtcatctcaagtcgcgtttcgttcaccattatcgcaacgctaacttgcacttattggttaactctgttgaaattggtcagatggatggtcaaattattgggaatcgtaactacgacctctacttgtccacccatccctacccattctggatcgacactagtatccatgaccaccactaactctactgctaaaacaatacaaattagcgataaaaagtcgttgcgaagatgctcgcaacgacttttttataggacccagattggcaattcatactacttgatcaccgtccacttaccggccagcaatgctaatgaccacttaattgactccccacccactcggctaataaaaaagactgctgaccatctcaatatggtcacacagtcagtcttgattaatcttagtcctcagaagcgttgattgcttccagaagcatgtcaagttgttcacatttacgagataagtgactcacccgttctttcaaatgcggataaatggtcacaacccgtgagcgatcctgttgccgaacggctagcgtccttaaatgatcgagttgggtattagcctcttgatattcttccagaatctcaaaacgattactcactgatagcacttccttatcacaatagatggtccaatttttcgaattgaaaaacgacaaacataatataccacaattattggtaagtttaaatcataaaattcaaaaaaatttaaataaaaatcgggtctatgatatttagtgttgatggataaaatccatcaacactatttttatgtacaacaaaaggacatatcgtcctgtgctacaatcaagtcgaccaaaaccaattgaaagcgagtgtcagatatgtcccaggaccattctactaaagtactgctccaaattaaagacccaaatattactgatttagttgttcaaaaagctactaacggaagcttacaagtgcttgcaaagctaacgtatccggttactgtttgcgcacgttgtggcaaacgttccatggttaagaatggctttaagaccgttcacatcagaattcctagaattagcgaacgagtcaccatccttaacttaaagaagcagcgatttatctgtaaaaattgtggtaaaagtagtttaacaacgactacgctggttaaaaaacatcatcaaatatctgaaaacagtctgcatgccattgatctatcattaactgaagaccgtacgatggctagtattgcggctcaatacaatgtctcgaccaatacgattagtcgccgaataaagttactcggacaaggtacccaaccagctttcaacggactaccaacgatgctttgtatcgacgaatttcgttcaactggtaaacaaatgagttttattgcggtggatgcccaaacccacgacatcattacaattttaccaggacgtaagaatgccgatattaaagacttctttctcaatcattattctaaacgtcatcgtgaccgcgtaacccgggttgtgatggactttaattctcaatatcaacccgcgattcgaacactctttccacacgccaaactagtcgcagataactttcatcttgttcaaatggccttacgatctttgaatcaaactcgggtccaactcatgaaacgctttaaccctaagagtcgtgaataccgagtgcttaaatattattggcggttatatttaaaagattatgacagcctcgaaaagcgcaaacctcaatggtttgcgcatcttaaagatcgcatgacaccagagcaattagtcgtagccggtttaaatctagaccaacagtttcgacaaacctaccaagccgcacatgccttagttaaggcttttcaaaagcgtgattatcgatccttcaaagcagcactaggtcatgtcgaaaatgtcagtcctcagctaatgaccaatattaaaagctttatcaagaaccggcaactcatcaaaaatatgactaccggccgattatcaaatggtcccgtcgaaggtgtgaaccgtaaaatcaagcaaatcaaaagaaccgcgtatggttacaagaactggcaaaactttatttatcgaattcaaattgagttcaaaatcaaaatcgaaaaaaagaacccaattcgtaaatgaattggattctaaatataacttcatcaacaccggttgacagagaccctaaaaatacccctaacacttaacaatatcgtgttaggggtatttgcaattaaaatcggcttacttaaccgtacctgcaaaacttggcatgaagtaagaactgattgtctgaacttgaacgttttggccttcagttggagccgcaacgtattgattatttccaatatagatggcatcgtgataagtgctaccacgactaccccagaataaaatatctccaggttgagcatccgcaacggaatgcgtcgtcacataagattcctgtgcaaccgtactatgtggcaaggtaatcccagctgcatgttggtaaacataggaaactaaaccagaacaatccattcccgaaagactcgcaccaccccaaacataagggatgttggcactagccaacttcagcgcaaggccggttacagaaccagtagctaaatcactcgttgaactagtagtggtactgctactattagtcgttgcggtactacttgcggtattgcttgcactgctagtggctgctgaagaactactctgactggtcgtgcttgaactagtcgctgccgagctactctggctcgctgtactcgtagttgatgctgcactagcagttgaagcggtactttgactagtcgttgttgaactagcagctgatgaggacgcgctactcgttactgaggcactcgctgcaacactcttcgactgactggtagcagtcgaagaactagcactacttgctgatacggctgcactcgttgcgactgctttgaccggtgcatttgaggtcgtagccgttgatgaagcaacagagccggtcgatgatgatatcgttgacgtgctagtactgcttgctgagttcgcactgacagcatcctgacttgctgcactggtgctacttacaacgcttgcactcacacttgaaaccgaactcgcacttgtacttgaggtggaactcgcactaacagccgtcgtggccttggcagtcgtactcgtagttgacgctgcactagtagctgacatggttgttttttgactcgtcttagcggtcgtcttggtcgttgctcctggcacttgaatgttctgacccaccacaattaaatcgccagaaagaccatttaacgtctggagagcgtgaacagaagtgttgtacttatcagcaagcgcccaaagagtgtcacccgctttaacggtatatgtacccttagtagcggctttcttagttgctgacttagtcgtggcggtcttagttgcggatccaccaatttgtaagttttgaccaacataaattaaatcgatattaccatcagatgctttaatctggttaagtttttcaatactctgcacggaaacaccgtgttgttgagcgaggccccaaactgtatcgtttgcttttacagtgattgaggcagcattggcagcttggcctgtagcaagcaataaaccaacggcaccaaccgtactggctaggaccttgcccgttgtatgtgcttgtgacatttaattcactccttagtttttgaactcaaattaacagtaacaaaatcgtcttgtgactgaagattaagaaattcttaacctgcttttacaaatcataattttattgtagcacaatttaccaaaatacaaactagaatcgctcgtttttttacaaaacagtccggttattttgaaaaacgtttgccaatgccaaagcggcgcatttggctgttatagcaacgtttatgcatataaacggaatgttatcttttgattacttcaagtaattagttgcactgtttggacgagttacgctattcagtaaaccaaccaaaaagaggctgtgacataagtctctagaaacaaagcaggtctggaaaaatcttcggatttttccagacctgcttttgatataatagaaaataaaaaaagagcatcggtcgcacccgatactctacgaaattatcctcgaaaggacattcctaatatgcaagattattataacatgaatcaaaccactttgagtattgccttggattaccaaccagaagatcatcattctgctcgttacatcaaccagcttgttgagagtttaaaactaaaatatgattaccagtttggccgtccgcgggaatataacctcggtgccatgttaaaactggtccttttagcgtacagctatggcattttcagcagtcgtaaaattgaacggtttgcccgtgaaaacaagccagctgggtggttaattgccgaccaaattccgtcctaccggacgatttgtcgctttagaatttctgatgaactggccactttgacaaccgatagcttatcacagctaacccaatatcttcgtcaaaatggcatgattgatgatgtttcatttattgatggaactaagatcctagccgacgccaacaagtatagctttgtttggaagaagaatacgatacgatttgacaagatgaatcgcgaaaaactcgttgacctgttaggcgagcttcatgaagctaaaattgtcggtgaaattccggcaggatcagagctgactcccgaactattggatatcatgattagcaaggttgaggatcacttagtggtccttaatgaaaccgtggaagcaactaagcaggtttccccgaacccagccaaacagcaacgccggactgttaaatcacaaaaacgtaagttggataaacgacgtgataaaatgcgtgaacaccaagcacagcaagcaatctatggtcagcgtaacagctactctaagacggatcacgatgccacctttatgcgggtcaaggaagatccgatgcaaaacggtcaattaaaacctgcctacaacgttcaaatcgccacgagtaatcagttcattacgggatatcggcttttccaaaatccaaccgacacacgaaccttacaaccgtttattgaacatttaaaggccaacaatgtgttaggtcacaccatcgttaccgatgccggatacggttccgaaagtaattatcggtacttggaagatgaattcggtcagcataccgttttgattccctacggcacaatgcttaaagagaatagtcgaaaatggcaaagtgatgaccgtaaggttatgaactgggactatcatgaaaaagatgattattttatcaatccgcaaaacgtccggtttaattttaatgcttatcgtcgacggactgataagtatggttttacccgtgactttaaagaatacattgccgaaaagtatgatgaaaatcatcaactaattgccgcggcactaacaccaaaaggatatcttaaaaggatttccgtgaacgaaaattgggaatatttcaaatcgaaacaacgagaattactttcagctccagaaactggtcagatttacgctcaacgtaagatcgatgttgagccagtttttggcaagatgaaggcttctttacatttcaatcgattctcggtgcgaggtttcgacaaggtcaccaaggaagccggaatcgtaatactggcgttaaacattatgaaactggtcacggtagggaccaactttaaaaatcaaaggcgtaagcaaatgggacgagaaaccaaaattcggtttctcgtcccatttgcttatacagaggctagttatgtcacagcctcttaaagttgcgagctagatgcgaggatcaaacaaccgatcaactggttgctgttcatgtactaatttgattgcatcacccaataatggaccaaccgaaagttgcaccaacttatcaaagtgtttatccgctgggatctgaatcgtatccgtcacgatgactttctcgaacttggaagcctgtaatttagccactgcatcctgtgaaaagattgcgtgagtcgcacagccgtatacggtcgctgctcccgcttgtgctaaagcatctgccgagacatcgaaccgggttcccgtatcaatcatatcatcgatcacaatggcgacgcgccctttcacatcaccaataatactacttggcactaggtcatcatcatctgggtgtcgattatcaataatcgcaattggggcccccaatagttctgccatcttacgtgcccgcgaaacaccggcatgatctggtgacacgacgacgagattatcggtaataccgcgatctttaaaataacttgccaagagtggggccgcaaataaatgatcaaccggaatatcaaagaatccttgaatctgtgcggcgtgcagatcgaccgtcaagactcgactggcccggtccttttccaataacgttgcaattaattttgcagtaatgggctcacgtgaacgcgctttgcgatcttgacgtgagtacccgtaataaggaataaccacgttaatctgactggcactagcacgtcttaaggcatcgatcatgatcaataattctaatattgtatcattgaccggttccgaaatagattgaatgacgaaaacttccgccccacgaatactttcttcgatgttgatctgaatttcaccatcactaaaccgctttacggaacttttgccgagtggaattccgacccgctgcgcaattttttcggctaacggtaggttcgaattcagggcaaacagtttcagtttggcataagattgatctgttgacataacgacctccataaaagttgtttgatgattttgctactttgattatagcagtaaccacggctaaaaaccgcacacaagcaaattttcttgcataatgagcgtcgccgacaatgtgtcgttcaccgtaatttcagttgcaataaccaattaattatcaattagctacttgcggcatgaaattagctggcgtgataccattcatgccaatcatcggatcgattcggccagcgctgactagcgctggggtcaaaattgttggtccagcagactgggaactcggttcctgagttttttcagtggccgactcctcgtcagaagcaactttcttaaccgccgtcgctttttcgccgactggcattgcctctgcttggtcagtagtcgcaatagtggccgtttcatcggatacggtatccccgccaaagacttgttgtaaccgtttcgtcagtgtggtttggcgattaaccgattcattggtaacgctccgctcaaatgattgactatcacctaacaggatcagcatttgttcagcacgtgtcacggcagtatacagtagattgcgttgtagcatccgtgcaaattgtggtaccagtggcagaataaccattttaaactggctcccttgagacttgtggatcgacatactgtacgctaatgtcaatcgattccattcattgcgttgataagtcacttcattttgatcaaaggcaatcgtgatctggtctttcttcgattcattgtgagaatcatttgccagatcgataccgacgattttaccaatgtcgccattaaaaacattatcctcgggtgaattaacgaggtgcaggaccttatcaccgacccgaaaatcttgaccgttatacgttagatgcttctgatgggcactcttcaacggattaaagattttctgaaccgtggtattcagctgatcgatcccggcagtgccgcgatacatcggggccagaatttgtacctcctcagcactgaagcccttcgccttggcacgtgccacaacttgttcaacaatgtgattgacttgataagcgttgcaggcaataaatgagcgatccggttggttgacggcaaaatcggccggtaaatgaccatctttgatggcgtgggccaacggaataatactggaatcattgccctgccggtagattgtcgttaactcaatttggggcagttcactaaactgcaataaatcatgaaacacttgcccggctcctaccgatggcagttgatccttatcgccaacaagaatgacttgcatgtgacttggaatcgccgtcagtaactgctgaaacagtaccgtgtcaaccatcgacatttcgtcaataatcaggaggcccccatctaattccttactaggctcctcgggaccatcttcacgccccgtcaacccaagcaaccgatgaatagtactagctgggagcccagtcgtttcagccatccgcttggctgcccgtccagtcggtgccgccagcaggattggaaaaggcttatccttatactgattgatatctagtgcaacgtcgtgtaattccgcatagagcgcgactaagccacggataatggtcgttttaccagtccccggtcccccagttagtagaaaaacaggcgccgtaatcgccgcttttagtgcttcggtttgtgattcatcataagtaatgttgctagctcgaccgacatgctcgatagcatgatccacggcacgttcagacaatttttcatcattatcggcggctaacaaccgttgtaaatgttccgcaacgcgccactcggcttcatagagaccgcgcaagtagatacgattctcgtcacccacgattttattttccttcgccaagacgaccaactgatcagccagcttcgaaggatcaatttgaacattgcgagcattctcaagtagttgcaacgtttgattcagcaacggttgagccgtggtatacgtatcaccgttttccacgcacagctcattaatctcagtcaatagggccgcctttaaccggtcatccgcttggggatcaattttaagttgggccgcaatttgatccgcttttttgaacccgacgcctttgatatcctcaaccaaacagtacggattcgcttgaatcttagccaaagtgtcaccttgatagcgtgcatagatggccgcagctaaccgactcccaaaaccgtacgcattaagtccgatgatagtttgctccaaaccgttattgaccgtgagcgtgtcgatcaaagtcgtctgaacgctggcccgaagtccgattggttttaaaaccttcggatcagctaaaatttgatcaatggcgtcttcgcccaaagtatcgacgattcgctcagcagtccgcttacccaacccaggaaaatcactaccagatagataggcaatcaagcctgcgcgtgtcgtgggcgtttcattttgataattatccgcttgaaactgaaccccgtatttgggatgcgtgaccgttttaccggtaaaacgatacgttgtctcctcctgaatatccgcaaaatttccagtaacaacgatctcatcttccgaccaatcaatgttctgttcagttactttgactaataagactttataaaaactatcggcactgctaaaaaaaacggcagcgactttaccgacgataaagtgtgtgaccggttcccgaccaatatcgtcggaaaataaatgtgcttgttcgtccgtcacggaaatcctcctaaattagtgattttgattatctgcttgtgcggctaacattttttcaatatccgttagctgttgctgatgacttttaaaatattgactgtccaatttctgcgcgcgttcaaaccaggtggcatacggttttcccagtaccattgcggtcagtccaaggttaaaagcagctcgcccagattgcgaatcaatcttatatgcgcgttgatagtaatccgatgcttgctgattattgcctaatgcaagtaatatgtctgctactaacaaattagcgtcaagttgttgtggacgtgcctcttgagccgtaatggcccagaccagggcatgttggtaatcgtgttgggccattaaagcttgtgcactcattaaataagcatcctgttttagttgatcatccgtaatttgttgataatatggtaacgctttgtcataagtttgagcttgataatagacatttcccaacgcataacgcaggtagtcggctgcgggttgttggtggtcaaactttcccaacgccttcattgctaacgcctctgcctgttcaaaatcttgaccagccgttaataataccactagttcataataagcatggtagtcctcgggctgtgcatcaatcttgccaatgagttgatggactagtgcttgctgtttagctttgctaggacgtgatgtttttgccatccgaaccacttccttctatattaaatcgtatcagttgcatcgggccgccgtgataggtatgaggtgtcattccaatctaatagcttaaaatgttgaccacggtcacgcgtctctaaaattgttgttgacgtattcgacaagccaccccgttgccgtaacgtcgccagtgtcgctcccagtaatgagttgactaaggcattcaaggctgcaccatgactaacgatcaaaacattgtcatcgcgacgtggatttgcttgaacaatttgcttaatagcgggagtcatccgcttcagcagttgttgaaagctctccccctgaatcgctgtcgggtcatactgatccggatgatttcgaaacgcgtcgaattcggccggatacgtagcttcaacatccgtgaaggccattccttccatcttaccgagattgaactcccgtaaacgactcagtaccgttatgggtaactctgattgtgtcaaatcattacgtagtgtcatcgctgtatcacgcgcccgttttaacggactgacatagatatgactaaaccgaatatcctggagcgccgctgccaattcatgaatttcttgataactagtcggtaataatggtgaatctccctgagagccttgatagcgcccctcaagattccactctgttttcccatggcgaacaaataatagttttgtcaattgcttacttccttactctagtgtcttgatttgatcttattttcgagcaatggcccctccaaactgaataacggttgcgatgatttagcagtatcattgcaactcatcgtcaatcgccgttaggccaaccctgttaatacttcaaatgacgtggcggatggtcgtgatacttcgtcacgctcgcaacacgtcttacgttctatattatgacagttttcagactgattttcaaaatctgttcacgaattttaacgatcatcacgctattatttgataaacgcgatcagttgaccgggcatggtatcttttagccactaagtatgcaactgctacgccatactgccaatggctgttattcaccgtactactcagccgtaagagtaaatcgtcgtttttccaatctacttaataaaaatataattatgtaaactaaatcagccgaaccaacttcaactccagcattaccctgctttaacaaaaaagtggtaagtagctttgaaacactacttaccaccactaattattatgcagcgggcacaatcgccaaggtccaagtaataatgctttgatactcaccaggcgttgccaatggtgttgctggtaactgtaatgaactaggtgccacatcaaaagtttgactctgatgaccagtttgccggtaaacgctggttgtcgaaccatccgttggtatcgtttgattgagcactcccgtcgagtctttgagcattaaccgagccgtcttgattgttgtatttccagcagtaaagggactcagactcgccattaactgccagtcagccccaacagtccggtcatcaaccacggccaaccgatagtcattattaccgtcataaccgtcattagcttttacggccgtcgggtctgtcgccaagtcagtgccttgtgcaagtcgctgcaggtttaacgttccaaaattaaaattaggaacggcactcaatgataaccgcccaccactcttaactgttagcaaagcggcgttggtcgtcaccgtctgtggcttgccattgaccggatagcttagactcgcatagtaggccgttccatcatcatccgcattggtcggtaccttgaccgtataactcgtatccgtgacattgagggctgtagccttaccattcttgacacgataccaattgctaacagtcaccccctcgggcaatgctggtaatgtaaatgttgccggcgtcccttctacgaccgtcacatcttgtaacgctccaaccaaaattttgacgctatcactcagaccattagaggttccggtaatcgtgacagttccgtgatcatccgcttttccggaattatccgtggcggcatccgctgcggtcacattcccatattcatcaactgccgcaagtgacgggtcactactcttccaagtaattggatccgttgcttcctctggcgtcagtgctgcatgtaccatggtcgtttgtgcattattgagccacgcgtcatcactcgtcactttgatgccagtcgttaccacccgggctggcgtgaccgtcactttcgcgattttggaccaataatcaggaaacgccccaacaccagagaaatcatactggacctgaaaataaagatgcgttgttttggtcacttgcggcgcattgaaagtataggttcgactattagtgccaatcttctgataggtttgcccctcatccgtcgattcccaccaaacgtacttgcgaccactcaacagacttgtcgccgcctcaagcgcactgcgctgggcccgaaccgacagcgttactgagttgccaccaatcacatttgaatcgattggctgttgtgaaaaaccgcccgatagattcaaacctaagacggaactcggtggactgcttggcgattggggcgccgttttggctgctaaggcactcgtgacgatacctaaaccaaccagcatacttatcaccattaggccacaagccttgatcaactttctcatcgttcctcactccttacgcgaacgccgctggccaaaccagtacgccgccattagaagtgctaagagaatgactagtgccactgcaccccacagccaccagttgacctgacgcggtccaaccagatgatgattatgttgttgcgcccgttctgcagtcaaggtaaagtcacgggtgaaatcccagacacgctggccgctcgttagatgcaattttagtcggtacttccctgcggctaagttttgcgtgcccaacgcgacttgatagttaaaccagctattcggtgccattgatcctgatttaagttgctgcgtggcaacggtttttcccgtcgtgcgttgaataacgcgtgcttgaattttgagttgtccaaaaagtgtcggcgtcagattacggagtttggcaaagagtactggttgcccattggtgggcgtcactttgacttcatcgaggactaacttaactggaatcgtcacttgcggctgacaccaaagcgccaccgctgtaacctctgcatagcgattcttcaacataaaaccttgactcgtcgttggccgggccgcattggcggttggattggtgacaaagaggccacctaacacctccccttggaacccagacttgggaatcgtggtcttaaaagccaccgttttcgcttgatgagccgctaacttaactacgacgccacttgacgtcatgtcagtaaacgtcgtcgtggcagatgggtcatgccgcttagacggcacgtacgcgacgctgcctgcatctgaggtcgttgcgttgaccggtgttacctgcaacgtaattgctgatttaccaggattgctgacggagactctgaacgttgacgtcgttcccggcgtgaccttcatattaaagtaacccgcctgcttatctagttgatccttgggcagtaggggtgtcagaataaaacccgatgcgggtgtgttagatgccgcttgaccaggtaatgaccctaaaagcccgcctagtagcaatgccaacactaataaccaccactgaccgatttgtttccatcgcattctaaacacccccacttcacttaatcattgaataacgacgcgcgatgatcagctgaacctatgaagctgcttttggtgttgctgcagcagctgctggtgcattttgaagcgtccagtaaagcgttgctgtgtaagttccagcagaaatattggactgcttaccgacttgcaatgaactgctcgtggcagtcgtcgctgtatttgaaccttcaccactatctgcagcagcattccataacgtttgtgggctcgcgacccatccgtttgtcacttcgctctgattcaaactcaatgcggtcggcgcggcagtattagcattgtcagcgttacccttggtcatattcaaattcaatgtggccgagtcaactttagccgctcccgaactaaacggtcccatcccaactgtcaacgtccagccagcatgatttccccgaaagtcgctaacgtttaaattgccactaccattgccatcatagccactgcctcccgacgtattgctacttgttgcatttaacgttgtggcagcagatgcaatattcttaacgttggtcgaacttaacgcgatatttggcacagcatccaacgttaattcaccgggcataaccgtaaattgtgcattcgataacgcttccgcattacccgtgctatccgcaacataaccagacgaaactgtcgtcaaattgttgcttgctgttccgggtccggccgctaacaccgctaggggcattagcgcaagtgatagtaaagttgcgccaccactcaacccggtcattaatttaaaagttcgcatgttgcttcctccttctcaatcgactgcttttccagtcgcctgctaccatattagtttactaatcactttatgattccgctttcaccgtcctcttcccctgacgccaaccatagtttatcatgtataccaatcgaaactgtgggttatgttttgattcattaactttccatattaattaaacgcctggtgataaccggccacaacgtggatacccagtcacccttgtaaccaaaaaaacatcaaggcccgttgtccttgatgtttttacatcattaattcatttatttttttaacgcttcatctaacgcaataacgcccttaactggaccaaccacagtaatcacatcatggagggccatcatatccgtcggcttgggcgagacatcaatgtgtttctcgtgtttgattgcaattaccgtcagaccaaaacgttgccggatctttaaatcgatcagattctgattaacaaagttcggatccgtaatctcgattgcggccaacgtatactcatcacttaagtcaataaagtttaaaatatggttggaaaggatgcggtgggcaatgccctgacccatatcacgttccggaaatacgacttggtcagcgccgacccgttcaaggacccgcccctggtcgctagtttcggccttggcgatgacctttttcgccccctgctccttgctcaacatcgtcgtcagaatactggcttccatattattgccaatcccaataatcacataatcaaacgtatcgacgttcaaatcacgcaacacctgctcgtcacgggtatcagcaatcattgtctgtgtcgccacgtccattagctcgttaactggttcttcgttaatatcaacggccaaaacatcctgatgagctgcggcaagcgcccgaacaacactctcaccaaaccgtcctagaccaaatacagcaaaactttttcgcatgttgcccacctaaccaatcaaaatattttctgccggataacggatcaagttcaccctagcttgacgtctggaaagcgcgtagagtgacgtgaagatccccacccggccaataaacattagcatcatgattacaatcttcccaatcaaagtcagattgggcgtcaatcccaaactgagtccgacggttccaaatgctgataacacttcaaacaaaacgtattccaacccgaagcccttcggaattttttcagtctgcgttaagatcagtgttgccactgtcagcacaatactagccaagaaaatcagcattagcgcccgattgatattctcctgactaaaacgacgatgactaaactcaacatcacggcgaccacgtagctgggcaatactttggaacatcaaaacgccaaacgttgtcgtcttgatcccacccgcagtcgatccaggcgtcccaccaacgaacatcagaatcataatgaccaataaactccccgcttgcaatccttgagtaggcattgtaattaaacccgctgtccggggggtaacacttaaaaacagcgtattgatcgttcggttgacccacgacattccggttggcaacagttccaagtcacgttcagtgatcaacaacaagacaaaaccgatgacaaataaactgaaagttgtgagtaaggtcagtttggaatttaaagtcagtcgcttacgcgtatggtacagcagcacgtcacgccaaactaaaaacccaaggccacccgcaataattaggatcatcgtaaccgtcaagacgtatggatcattacgaaagccttgcagactatcgccaaacacatcaaaaccggcattacaaaatgacataaccgcatggtatagtgacacatacaatccgtgacgccaaccaaatcgaggtacaaaatcaattgcgagcaacccaagaccgcctagctgaaagagcagtgacaaacccacgacatacttcataacgcttttagtatcactcaatcgttccaaattcagggaggccttgaccatcaactgcgtagagagaccgatctgacgacgcataatattaaagaggagtaccgcaaaggtcatgtagcccagcgcaccgacctccgaaagtaccagaatcaccaattgaccaaacgttgtccagtgcgcagcagtattgacgacggtcagcccagtaatacatgtcgctgatgccgacgtaaacaacacatcgatcaacgacgtgtgcacgtttgctggcgtcgcccatgggaggctcagtaagactgtcccaatcagaattaagataataaaaccggctaccattttcttagatagcgtatcaaaaaatttaaaatgtgctaattgtctcataatcattccatcccacaacagcttatcgattataaccaatcagtccgattgatcatactccatttagcttaatcaacctagccaagaaaagcaagtccgacctaagctttgacgtacgccggccacggccgacccaatacatacaaaaaaaccgctaatcaagctcagcttgatcagcggtaaaccaattacgaactaaacatactgtaagacgcgctcatcattataagcagcgtcaatcataccggaacctaagcattcctcaccgttgtagaagacaacggcctgtccaggagtaatcgcccgaactggatcatcaaaagtcacggtaacttccgtgtggtcatcattaaaatgcaccgtcacaccagaatctttttgccggtaacggaactttgccgtcacgtggaagtcattacctaagtcttcatcagtcacaaagtgtaagtcggacgcctttaagtgggttgcgtacaggtgcggattatggtagcccttgccaacatacagaatatttttcttcagatctttaccgaccacaaaccatggctcgttatcctcaccatcaccaccgataccaagtccgcggcgctggccaatcgtgtaatacatcagcccggcgtgctcaccctttacttgaccatcgaaagtcatcatcttacctggtgttgctggtaagtaatggcctaggaattccttgaagttcttttcgccaatgaagcagatcccaacggagtccttcttcttagctgttgccaagcccgcgtttaaagcaagcttacgaacgtcaggcttcaccatttcgccaagtgggaacatcaccttttgtaaggtcttcgaatccagctgacttaagaaataagtttggtccttgttgctgtcaacaccacgcaaaaggtgcatcgtgccatcttcatcatgttgtaaccgcgcgtaatgaccagtggcaatgtaatccgcccctaaatccatcgcgtaatctaaaaacgccttaaacttaatttctttgttgcagataacatcggggttcggtgtgcgtcccttcttgtattcgtctaagaagtacgtgaagacccggtcccaatattccttctcgaagttaatcgagtaataaggaatcccaattttatctgccactttggcaacatctttataatcttcggtcgcggtacagacaccattttcgtccgtatcgtcccaattcttcataaacacgcccaccacgtcataaccttgctgcttcaagagcaacgccactacggatgaatcaacaccaccactcatgccgacaacgacacgcgtgttactgtgatcagtcatacttttcaccatcatttccaaaagattctggagaatccacgatttgaaggtcgtacaagtccagtaagttccattataacaaagaaaacgccggctgcaagccaggcgttccctgattagtccgtcgtgaggacatcccgttcaataaagttagctaaaatataccgtaattgttcaacagcttccggatgggcgtcatttttgaaaatatttgcccgttggacaccattgcccgttaccgtcgtcatcttaaacccagtcaaatccgcattgactgtcatcttcagcttgaaagccgcttgatagggtgaagtgggatccaaggaacgttcaaaactaaacgcgcccgagcgacccttcacaaaacccaaatccatcaacgtgtatttcttgaccgttggactcagcgtatacgtcttagtatccccatctagtttaaccgttgttgtgtatgccatcgtcacgccccctgcttttttaataagcgctgcgtcgtcttcgtcagcaccgttacaaactgatccagatcagccttagtagtatagcgaccaaagctcaaccgaatcgactcgctgatccggggagagtcttcaccatacattgcaattaaaacgtgtgatggttctaggctccccgccgtacatgcggagcccccagaaactgcgacaccacctaagtccaggttagtttgcattgtataggtcgatacccctttgatccataagttcaaaacgtgttgcaagttatgctcaccgagggacccgttgacttcaaaatcaactccgttagccgttaactggtcaacgatgtattgcttgaactcacgatacttagcctgccggtgggctttctcagcggtcgtcagttcttgcacggccgtggcaaagcccgcgattgccgggatattttcagtaccggcacggcgcttatcttcctgttcgccacccttgacaaagctaggaaagttaatgccattgcgtctatacaagaagcccaagaatttaggcccattgattttatgtgctgaggtggacaacatgtcaatatgatcccgttgcacatcaatatccaacaacccgtaggcctgcactgcatccgtatggaaccatgcctggtgatcctttaacaattcaccaatttcatggattggcatctgtgaaccaacttcattattcccggtcatgattgagacgagaatcgtatcaggacgtagtgccgccttcaaatcatccagactaatttgtccctgttcattcacgggtaaataagtaatctcaaacccatgttctgccaaaaaagcagtcgatttaagaattgcttgatgttcgattgccgtcgtaataatatgcttgcctaaatgttggcgcgtccacgcggtctgcatcaccgccgtattatcactttctgtaccaccactggtaaagataatgtcatcgtcagctgcgttaatgctttgggcaatcacgtgccgactatcgtctaaaacttcacgggcggcccgaccgaatgcgtgggtgcttgaagcattgccaaacgtattcgtcatttgatccgtcatcgtctgaataacggacgctgccattggggtcgttgccgcattgtctaggtacacttgcttcattacatcatacttccttctaaataattcttagttattagcatcgctgcgatacatctgactaattttgcgccgcaaataatgcaagtaacatcgctgcggactgcttacccgcttccaggataaattcgtcaaaactaacaccggcattttcatcaccgacatcggacatcgcgcgaatcaccacatatggcgtctggaactggtgacaagcttgaccaattgcggcgccctccatttcactagatagtgcttctggaaagtgtgctaaaatcttatcggtagccgccttacctgcgataaattggtcaccggaaacaatcagtccagtcttggcattcaaaccggttgccttggccgccgccatgatttgctttacccaattggcatccgtttcgtagtatagtggctgttgtggtaattggccatattcgtagtcaaaggccgtcgcatcaacatcgtgataagcagttgccttagctacgacaacgtcaccgacatgcaaaccagcgccaatcccacctgcagaaccagagttgatgacaacgtccacatcaaagttagtaatcattaaagccgtagtcataccagcttgcactttaccaatgcctgattgcactaagacaacttcctgctgatcaattgtcccatcatagaacgtaatatccttaatattaacgatcttttcgtcttgcaaagcatcccgtaacgttttaagttcttcttccatcgcacaaataattccaaatttcatgtgagcctagcgcctactttctatggtgttaaaaataaaattaaaaagacaataataatcccaacgactagtccagcaatcgcccaattcaatttgcgggctagccgtttcgtcttggcttcttcaacagcccggttgttctcagcagcatacgcttgtcgggatgcactgggttcggccgttggtgattcttgttcctgagtatcgtgaccagttggctggctacgttgttgtcgatattgctgtctggtgagtcgatcatcatctgccactatgcttcaactcctaactcagggtgactttgccagtaccaaatcgccattacggttttggcatcctgaatctgaccagtctgaacttgactgacagccgtcgcgaggtccagcttgatgagcctaatttgttcgtcagggtcttgtgggaatgccgttgcaaccgcactcagaccggtagcaacgtacaacttcattagttcgtccgtaaacccgggtgacgtgtagaattgggcgactgcttctaagtgctgagctgtcaatcgggtttcctcatttaattcgcggacggccgcctggtccatggtctcaccggattcgaccttaccagccggaatctcgacggtcagcccaccggttgcagcgcgccactgttgttcaacaatcattttatgttgcgcggtaatcatcagcatcgcgacggccggctggtgtcgcacaatttcacgtgttgccgtcgtttgatctggtaaagtgacttcttgtcgttcgacctgtaccaacccgccttgataaaccaactgacgactctgaacccgttcctcaaatgtcattgatcaagaacccctttcagtgtctgctctctcaataaggataccgattttttagctcgattgcaattttcaactgggcgatttcggtaattttaacgaacccgcaaaaaatgggctaacgagcgaccaatttggctccttaacccatttttccaattcttaaaatcaagcggaccaattgacactaatcgccattaggcctttgcaaggttagcgacgaaatcttcataagcaacctgctcaccagtttccgttgcggtagctgggctgtagtcgccctgaagcgcatcttctaatggcaaagtcacgatccggacgaacgtcgcgttaccgatcaattccatccagtattcttcatcggcaccttggtgaacaacggttttgaccatcccaccaggattggtgacgtggatttcttgattaaaatcggtactttcttggtgtaataacacgtacatcaatgaggaagccgacatcgcagtcccacaagcattggtaaaaccaaccccgcgttcaaacgtgcgtacaaaaattgaatttggtcctaagacttccacaaaactaacgttgacgccatcagggaaaatttggtttttaccatcattcatccattcaccgatacgtcctaattcggggccaaccaacgtatcatggtcaacgaacgcaatcaaatgcggattaggcaccgccacagctgagaatttcaagtcagcagacagcgctggaatcttttcattaataattgtcgtcgcatcgttattcgcatgcatgccaagtgtctgcgcgtcgaaagttacgggtgaaatttcaacactgtaagctgggacgtgggccgcaaaatcagcaacggcctgcacctttaagtccgcatacatcgtctgaacccggaagtcttcctgactattttgcgtgcccaaataacgagcaacggtccgtagcccattaccgcacatgctagcttccgtcccgtccgcattaatgacccgcatccgaccaagtacttgtggatgttctgatttatcaacaaccaacacgccatcagcgccatcgtacaaacctgcgccgtcacgtttacaaatgttaattgccaattgcttcaaatccgcatccgataacggtgcttgaaattgtgtttgatccaataaataaaaatcgttaccagaaccgtgtaccttgatcattttcacagccatcaacatcctatctatataaaatcgaccttaatttaaactacttcattatcatactgactttttcatgaaaattcaattgcaaaggaccatttctcataataaccattcaaagtcctgcgcagcaactgtaaattcttaatagctcttaaatcttgcatctgaaaaacgcaatcagttttttacagctgtatctcaatcatcccggtgttcggatttactgactacttgataatccccacacgccagcacaaaaaagtgccactaatcagtcccgtttgactgattagtggcacttttcataagttatcaagactcacgctaaatttaattcagattaagcttccaaaccagttgttactgattcagggtagttttcacgaacgattgcggcgcaccgtgcacataacatcggataagcctcgtcactgccaacatcggtcttaaccattcggcaacgatcacaaacgtcaccgtcagcatggccaaccttgatggctaacgtgtcaccaaatgtttctgcgtctgcaggcgcgtcacttaacgcgtgtagatctaatgctgaaaccatcaacatctgccgaacattggtgttcaaatgatctaagaaggcttgcgtatcatcatcaacatacaaatccaagtgtgcttccaaggatttaccaatcaacttagcatcccgggcttcttccaacgcctttaagacgttactccgaagatccatgaaccgcgtccattgagccatcaactcgtcgctgttcgcataattttgaacagctggcatctcagctaattgcgcaaattcttctggttccttcaagaatggccaaatttcttcagtcgtgtgtggcagcattggtgtgaagagcttcgtcaaggcaaccaaaacatcgtagaagaccgtttgcatcgaccgccgtgaatggctatcctcggcatcaatgtacataatatccttggcaatatcgagatagaagtttgataaatcaaccgtcaagaagttgatcaacttcttgtagatatccaagaaatcataatgatcgtaatggtccttcgtctcagctacgaattcgttcaaccgtgtttccatgtactggtccacacttgctaaatcttcataagccacgcggttggtcttcggatcaaagtctgcggtgttgcctaacatgaagcgtaccgtattccggaacttcttgtaggaatcggctacttgcttaaagctttccattgagacccgaacgtcggaactggtatccactgaagcgacccacatccgaacgatttcagcacccatctgcttaataacatcagctggcgcaatcgtgttgcccagtgacttactcatcttacgaccttgattatccaacgtgaaaccttgtgacaagacttgcttgtatggggcatgtccagaaacagccacactcgtaatcaagcttgagttgaaccaaccacgatattggtcagaaccttcaaggtataagtcggctggatagtcgaggtatgagcgctctgccaggacaccctggtgtgatgaaccagagtcgaaccaaacatccataatatcggtttccttagtaaaggtaccgtttggtgaatgttcattggtatagccatctggcaatagatccttagcgtcgcgttcgaaccaaacattcgaaccatacttgccaaataaatcagctacgtggttaatcgtcacttcgtccatgatggcagtgccatcttcagcatagaagattggaagaggtacaccccaaactcgttgccgtgaaatgacccagtcaccacggtcacgaatcatgttgtaaagacgctttttaccccactctgggaagaattcaacgtcatccatcgacttaaggatttcatcacgcatatcaccaacggaagcaaaccactgtggcgttgcccggaagataatcggcttcttagtccgccagtcaaatggatagctgtgttcgtatggcatatatttcagtaataacccagcggccttcaacttgtccagtgcgatcttgttagcgtcatcgtagaagacccccgcaaaatcatcaccagcttcagccgttaagaaccctttgtcatctacgggagcaaagattggcaggtcgtattgcttaccgatccggtagtcatcttccccataaccaggcgcagtatgcactagcccagtcccagaatcaagtgtgacaaaatcacctaacatcgttactaaatgccgactgttgtcaaaaggatgttcgcacaaaatgttttcgagttccgcacccttgaccgttttaagcacttgaacatcttcccaaccaaatcgtttggcattttcgtccaacaattcagccgcgagcacaaacttacgattttcaccagccggttgcacaacgacgtaatcaaaacttgcatcgattgtgattccttctgaagctggaatcgtccaaggagttgttgtccaaacaaccatataggtatcatcatctaagacacccttaccatcaatgacatgttcaccgtagaaggcggatggcgatgtcacatcatgatattccacttcagcttctgccaaagccgattcagaagaccatgaccagaagacaggcttttggccccggtagatcaagtgacgtttagcaaacgcaccaaagacccgcacttgagccgcttcaaattctggctttaacgttaagtatgggttgtcccattcaccagcaacgcctaagcgcttaaactcatcacgttgacgatcaacttgttccaacgcgtatttccgacaaagttctcggaattcattgtccgtcatcttcttgcggtcataaccggcttgctttaacttctgttcgattggtagcccatgggtatcccaaccaggaacgtaaggtgcccgaaacccattcatcgacttatagcgaacgatgaaatccttcgtgatcttatttaaggcgtgccccatatggatatcaccattcgcgtatggtgggccatcgtgtaagataaagcttggcttaccttcattcaatttttgccgttgttcgtagactttattttcagcccacacattttgccgttcaacttctttgaccggtaagtttccacgcattttaaacttggtcttaccgaggtttaacgtttctttaacgcgcatattctcactccttaaaatttttatcaaacaatcgccattggatttttagacacaaaaaaacttcgtccacccagggacgaagttatcgtggtaccacccaattttagaattgtttaaattctctcttagcatggttaacgtccatggaccggccacccttactcaattcaggatagcattcggagatgatctgcaactaactaagggacgactgcctttccattgccggcagctctctgggcgtattagctaattgtttgctgttctcctcaatacattcaattcgcttcaattgtgcctgacgatcgcctaattaattattagtgctgtcatcatcagggaaaataaccaccgtctgttgttggacttgatcgccaccgtccgcaacgggggtctcaccactcgttgcttccgtaatttcaacggttgcttctgagtttacgctcgcatcccccgagttgtcaaggttatcttcctttaaaacgtgttgaatttcagcataatcagccgtattcgtttcgctaagtagttgatcccaatccttgctcttaaccacttctaactgcgattctaacatcacttgcaagcgttgccggaagacccgcgtttgtttcttcaaatcatcagtttcaacggataatcgtttggccttttgagaagcttcgtcgatcatttggtttgacttgtcggttgcttcactcacaatgtcagacgcttgtttctgagcttcgcgggtgataatgtcggcttccttcttagagttcgtcttcactttatcagcagcttcttgagccaccaagatagattgattcaaggaatctttcaattcattgaaatacttcaacttaccttcactcgagtccaaccgttcttggaggtctttattttgcttcaaggtaatttgataatctttgataatttgttctagaaaatcattaacctcatcaatattgtaaccacgcagtttcgttgaaaactctttgttatgaatgtcatcaggacttaacaccattagaattcctccaatatctatttactatgaataatatttaatgttattcgcagccgcgcttttttggtctcaccgctaatttcggcaagtcggacacgaccgtaatggttcacactcagcatatctaacaatgctaactcgtaatcagctttcggtaagtcagcccaattcagccgaaccttagcaccttcgatcaattccttggcgtgatgccgcgacaagttgaacgccgccttaatgatactatccgcacgtaatgaactaaccgtcgtagtaactgcctcccagtcgtcttccggtgtgatcaccgccgacaatggtaccgctgttaagtggactttcgtcttaccaaaacggtcgatttgctcctcgaaatagctggccatctcggtttcgcacacaaactgccatgtcgttccgtcagtcacgatgtcaccaaagacatcacgctcgacgccggcattggcaagcgtccccagaatttgaccatgctttaaggtggcaaacttcacgggataaacaatgttaaacagtgtgatttgaaaatcggccacttcaggttcgtaatacaccgggtaaaataagatccgttgtaactcagcaccttcaaagccaccggatgcccgcatccgcacgtcgtctaactggttgaccagcgtttgcgcaatgtagatttgtcgcgggttcaaaaacgcagttaagattggtcggtactgatcagctacttgccgtagccaaccagtgacctgttcaataaatggggcttcactatcgcgaaaatgttgttttaagttatcattcacgatactatcctcgttattttaatttagtatatcaataaagttatcagataaaataggccactttcagctaattggagcactaacagcgcaatgatcggcgaaaaatccagtccggcaattgcgggaataaagcgccgaaaaatactgagaaatggttcacagatttgacctaagaattggcccacgcgagtattataagctcccgggaaccatgacatcaaaatgtaaaccacaatggctaattggtacagttgaaacaaccgactaataatcgtcactaacaggccactcactccttataatttgctcgtatcaaactgacttgtcgtacttccggaaacctcgtaattttcaggaatacagaggaaaatttcatcaccgatccgttcgatctcaccattgatggcaaaaaccgtcccggtcaaaaaatccacaatccggcgtgccatttcatcatcgacgtgatcaaaattaatgattacagcttgatttttcaataactgcgtcgcaatttctttcacgtccgaataaattttcggttcgaatagggcaattttgctattcaccgacttgcccccttgcattggaactacctttggcgtgctccgagtattggttgcagattcagtgggagccgccgcttgggaagcttcggtgggttcctcatactgactgtcagaatcaccaacaccaaaaaagttactaatgaatccggccatgtgcttgcgctcccttcaccgttttacttacgccggcgcttgaagaatggtggtgtatctagcgaatcaccactgttatcatccttactatcgtcagcttgtgagttgtcattaaagacatcaaaatcagttttttcaacattgttaaactcttgaccattgttgactggccgtgaattgttcggttcgcgccgaatatcccaattaccgaatgggtcgttagcttgggactcacttgattgggccgcttcactcgtcgctggctggtcagttggcgttgcgaacatgccgcctcgttgctgactagcttcactacgactaggctggctgtccatcttgagttcgcgttgcttctgatcgataccagtggcaatcacggtcacccggacttcatcgccaagactttcatcgatcgaagtcccaaagataatgttaacatcagtcgttgccgcttgggaaacaatgtcagaagcagcttgggcttcatacaaggacatgtcggggccacccgtgatgttcagcaagacttgttcggcaccatcgattgaaacttccaataatggtgaagaaatggcttgtttagtcgcgtccgccgtccggttctcaccactagcagagccaatacccatcagagcggaaccttggttttgcatgaccgtcttaacgtcggcaaagtccaagttaacgtaccctggtgacgtgattaagtcagagataccttgaaccccttgacgtaacacattatcagcttcttggaaggcttccatcattggagtcttcttatcaacgatttcaagcaaacggttgttagcaataatgatcaacgtatcaacgttgtctttcatctgagcaattccttcagcagcgttacgagcacgcttaggaccttcaaatgtaaatggacgggtgacaacacccactgtcagcgcgccggagtccttagcaattttagccacaactggtgccgcaccattaccagtaccgccacccataccggccgttacaaagaccatatctgagccttgtaacgcttctgtcaaggcctcttcactttcctgcgcagccttggaaccaacatcaggattagaacctgcgcctaatccccgcgtaagctttggtccaagttgaattttagtttcggcatttgaagtttgtaatgcctgcacatcagtgttggcaacgatgaattcgacgcctttaacatcttcagcaatcatccggttaacggcgttaccaccaccgccaccgacaccgatgactttaatattagcccctgagttctgggttgaatctaaagaaaattccatgttttttcctccgtcatttctatccgatattaatcaaagaagtggttgaagaagcctttgacccgttcaacagttcccttatgatctggatcagcctgttcctgtggtgcttgtggcgcagactgtttcttagttgcttttttaggttgtgctgcgggttggctaggtgctggtgttgtatcagcaaattccaacgccacactggcacgagtatcaccggtaagtgcactcttaacgagtaacgtaacttcactcaaggccgcttgatatttgatgaccgctaacgcctcatcaaacgacggatgcctcaagcccatttgattaggcgtaaagacgcgaactcgcgttccaaaacgttgcgccgccaaatcagtgataccgggtaatgctgccaccccaccagttaaaacaatgcccccggggagctcgagcgcccgaatctcatccaagtgctgcttgaccttatcaaagatctggtctagacgagcctcaatgatttctgctaagtattgctcacttatttgctccggtgtactttgcccaacaacatcaactgggaaaagttcatcatccgaggcctgctgagcatcggcatagccataatcacgctttaacttctcggcattctcgatcgatgtattcaaaacgaccgagatatctttggtaatatactggccgccttcttggtcaacgtaagtatacttcaattggtgatcatgtataactgccgcagtcgtttgaccaccgcccatgtcaataatgatcgaaccaaaatcttgttcaccgtcattcagcactaaggaacttaatgccaagggcgcgatcacaatctgttcaatttgcagtccagccttttccaaagccttccgcgtattgtgaatgattgttttcggaccagtgaacagggtgccgtgcatttcaagccggaccccaaccatgccacgtgggtccttgatgccatcaaaaccatcgacgacaaattcatcggggatgacatccagtacttcccgctctggcggtaaactctgaactaacgcagccgccgcaacgttttgaacatcttcattattaatttctttggactcatctgccacggcaatcataccacgacagcgttcaattttaaccaggttagcgggaactcccgcaatcaccttttttatttcgatacttgctttttcttcagcttggcgtactgctgatcgaatcgtttcggccgccttatcaatatcgacgatcacgccacgacttaaaccattagaacgtgcgcttcccacaccaataacgttcatttgccctttaacacgttcagcaacaatgacttttattgaggtggtccctatatcaagtccgacataaattcctgaattatccataatagaggaacctcctagtattttacataaatattcaaggatttgctgacatatccagttattccttagtttaccatatcctaagcgcttttaaaaaggtcacacttagcattctatcaattattctgattcttgaacggataggagtatgcgcccacctcaagattgatgacacccttggttttcatcttcgccacaattcccggataataagccatcttgctagcaaaagtgctaattgttgcgtacacttcattaccgtcattcatgtaaagatgaacccgttcgggattagccttgttcggcgcaaacttgatctcagaaatattgtgtttgaccgccgatggtaacttagcgtactgtgcaatcatcgttgctaagcggtgaccgcttttaaagttggcatagatcggtgaaccgccaccgggttgagaataggtcgctttcaaaatcaacccattttccaaaattcgtcgatagtgttgaccagtcgataagtaacccgcgatgcgaatttctttaactgtcacccgaacactgttcaatccaactaacttagtcgtgaccttgccgatttgcggctgggcacgttctgcgcgcttagtagtccgttgatcatgaccaatcacggaccataaggcaactccagggttgatcttagtcgccgtcttgacctgcgtaacagacaattgatcgttaccatgtacggtcaccgtctgaacatggctcagtggtgaaatgaagtaaccagccacaccagcaccgatcagaaaacagcccatcaagatcacgacccgtttgaaaagtaatcggcggcgctgagatttgagtttcggtaatttatcgccaattcgcaggcgtttacctgaccaactatggtgactcttttgcgctgcgcgatgattctcagccgcgtctcgttgaaaccgttcccagggtgtcagctgctcggggtgctcacgctccttgggctttttatgaaaaatggccatcacacccaccctttcactctagtctctgtgctacttaatcaccgtttctaaaacgtgtagtaactggtcggccgcatcaggcatccccagttttttcgcattagccgccatcgtttcacgatgcgtggtactttggagaaggccatctaatgcagctaccaaactggttcccgtcaaatcagcttccttaatcagttcagccgcccccgcattcacgaggctttgtgcattcttggtctgatgatcattcgtaacatatggactagggactagaattgaaggaatccctaaagccgtaatttccgcaatactagttgcacctgctcgaccaagaataaccgcgacttctggtagaattgctggcatatttttgatgtatggttcgattttaacattcggagctagcgctgtcgctgacaagccattccgaatcttttcgtagtgtacctggccggtgacgaacaaggtctgatagtcacgtttgttcagttcaggaattgccgcgaccgctgctgcgttaatgcgcgcagcaccccggctccccccaaaaatcaacgccgttggaatgtcaggatccagatcaaactgcgccaaagcgccactttttttaatattagccacttgttgggctcgaggattcccagtcatcacaactttttgagcgggaaattgtgatcgcgcactctcaaatgaaatggcgattttatccacaaaccgacttaggaatttgttagtgacaccaacaactgaattctgttcatgaatgaccgttggaatgtgcatctggctcgccgcgaaaacgaccgcaccactcacgtagcccccggttccgaccacaacatcaggtttaaacgccttaatgtacttacgcgccgtaaccacgctctttaaaaataaatagactgttttaacattttgtaatgacaatgaacgcttaaagccctggatcttgattgttttaaaatcgatcccccgttccggcacaatgcggctctctagtccacgatgggttcccacaaactgaacttgcgcttcgggatcatgtgcttttaaggcatcgatcagtgccagtgcgggatagatatgaccacctgtcccgccgccagaaatcattaatcgcattagttttcttccgcctttccagttaactgttcgattgctttaataaatcggtcgccccgcacttcgaagttcgggtactgatcccaactggcacaagccggtgataacatgatgatgtcaccagcctgactatgttgccaagcaattggcaccgcagtctcacagttgtccgtaaactcaatatcttgaataccagccaaacgcccagcgtccgccattttttcagcagtctcaccgaagacgattaacgtcttgacatgcgcctttaatgcgggagcaagcttttcaaacgtattaccacggtccaaaccaccagcaagtaaaatgaccggctgatcaaagcccttcaaggccatctcggtcgacaccaagttggttgctttggaatcgttgtaaaattgccggtcctgatacgtctcgacatattgagtccggtgtcgaacacccgtaaacgtcttcaagacttgaacgattcctgctgttggaacggcttgaagtttagcaacggcaatcgctgctaacgcattttcaacattatgatcaccaggaatccggatatcagcagcatccatgatgtactcatctttaaagtacagcttgccggcctcttcataggcgccatctttcgtattggcttgccgtgaaaatggcacgacggttgcttgtgattgcttactgagttgccgccattcttcactatcccaattaatgactagataatcattagccgtttggttcatggtgattcgcatctttgccttgacatagttctcacgtgagccatggtaatccaaatgcgtcgaataaatattcgtaatcaccgcaatatgtgggtgcaaagtttgaataccacacaacataaaactcgaaagctcagtcaccattgtgtcggccgccgtagccttttgtgcaattgctgaggccggcacgccaatattgcctgctacgtaagctttaccggcatttgtgcgttgattaagcatcatcgtgatcatcgtcgttgtcgtggttttaccgttcgtccccgtcacaccaatcaactctcccgctaggatttgcgatgcaagttcaacttcggtaataactggaacacccttttcctgagccccactcacaattggatttgagtatggaatacccgggttcttgacaacaactttaaaatcttcatctagtagtgacaacgggtgaccacccgtgataactttgattccatcactcaataattcctgtgcatccgggttctcatcaaatttctttttatcattaacggtcacaaacgcacctaatttgtggagcaaccgtgcggcattgaccccgctctttgctaatccaagaaccaaaaccttttggttacgatactgctcaaccgacttcataaaccaagatctccctataatgtttgtagatgatacctaaattaacttgttatgtggctgatgcaccaactcgtggtcatcagcaaattattcatggtgagccagtgaccaattccacgacataatctgcggcagacaacgcaaccatttaaagaacaatcgttgcgttgataggaatcagtactatttacttgtcacttacttggcgaccaccaatgaataaagtcataccgcaaagaccaattatgtacagctaactcggacaagaatgcccgagttagcaaactgtgactaaataatcgtggcaacactgattacggctgccactaaaccaatcgaccaaaaaacgatatcaatcttccactcgctccaacccttcatctcaaagtgatggtgaattggactcatcagaaagatccgttttcccgttaacttgaacgaggcgacttggaggataactgaagccgtttcaatgacaaaaatgatgccaatcaagaggagggatagttcatgatgcaataagattgatactgcagctaaagcaccaccgagcgctaatgatcccatgtcacccataaagatcttggccggtttgtgattatacacgaagaaacctaatagtgaccccacgacggccaaacagaataacataacattatactgattttgagcgtaagcaatcacggcatacgcaccaaaggcaatcgtggcctgaccagcgactaatccgtccaacccatccgttaagttgacggcatttgagaagcccactaaccagatgatggcgaagagcatgtaccaaattcccagcgaccagacccccaaacctggaatcctaagtgccattggcaaatgttcatgttgatagaccaacgttaaaattactgccccaatgacttgaccaagtaatttttgccaagcctttaaaccttcgttttgtttacgccaaagcttgatactatcatcccaaaaaccaagtgcaccgtataagaccaggataaacatcaaaatccaggtggttggttgtagctgatgttgccacccaccgacccataacgtggtgactaagattgcgataatgaacagtaggccccccatagttggcgtcccagattttttctcatgccacttaggaccttcctcacgaatcatctgtccttctttgcgggcgcggaaataccgaataagtgacggcattaacgcaaacacaataataaaaccactaattagggttgcaccccacactaataaactcacaacaattctccattctaagacttgataactacttcagtgtcacactaattgcctgcttagcttcgatcggattacccgcagtcacactttgcgtcttgacgtaacccgtcccgctagtcgtgagcttaacgcccgtcaacgtcgcaaaatcagccacttcacttgccgaccatccagataagttcggcatatacatctgcccgttggtaaccagaatgacgcgttgaccacttgaaacgacagtgccagaagaaatggattgcttgacgacccgactacccttaccaacaacgaccacgtcaagtccctgcttcttagcagctttcttggccgcgctagtcgacttactcgtcaaatctttcattttgatcgtcgtcgctttagtctcactcgctttttgttcttccaatgcccgtttcatcacggtatcaaaaatctctgccatgtcatctgacgcggaacttccgttaagtgtcggttgtttcatcgtaatgtacataatgtacttcggatttttagctggcgccatcccgacgaccgagtacagataggtgttgtcaccttgctcatacgtactcccgttgctgacctgggcagtcccagtcttagcagcaatgcgatacccgctgatcttatatgatgagccagtaccgtatgacttatataccacatcttgcatatgatccaacaccttgctggcagtcttcgaactaattggctggcttacaaccttcttcttacccgtataaaccgttttgttggtgttagggttagtgatcttggagataaagtacggctgtaacatcttaccatgattagcaatcgctgtgaatccacgaagcatctgcatagcggtcacctgaatcccctgaccaaaggccgtatccgcttgttcgattggatacgtaaattgaattgaaccactctgctcgttgtcaagaccactattagtactctcacgcaacccaaagcgtttaatgtacttcagccaagtcttggcccccattgcttgttctaggtgggccatcgccgtgttacttgaaagggcaaaccccttagcataggtaatattgccccacccgctcgtattccaatcaggaacggtattattaccgatcttatattcaccggttgggacggttacattagcattgtacttaccgctgtcgatcgccgctgccattgtaaagaccttcatcgtcgatcctggttcatacgtgtcttcaaccaacaaattacgccacattttagatagtccggtctttgtttgcgcattaaatgtcggtcgctgcgtcgtcgccagaatggcaccagtcttcgcgttcatcaacgttgctgtcattgacttaggtgagaccttagcgtttacttgtgaaactttagtttccagtaatgtctgtaacttactatcgatggtggtataaatattatccccatccttaaccttcttaccagtctcagtgctaccttgatatccgctcttcgtaatcgtcttgcgaccatcggttcccgataactgcttgttaaaagccaactcgatgcccatcgaccccgttaaccgcgtctgatcggtatccttctgactcttggaggtggtcagcccaaccaagtgggaagcaaacgtgccgtttgggtagagccgcgcttcagattcaataaagtgcagcccagccacattttgggcatcgatcttttccttagtcgtcagtgaaatattcttaccagccgtcccaaattcaatttggaacttacctgcgcctttttgcaaggtcgcgagggctttcttatagctgattggcaaatacttcgataagacacgcgccgccttcgcattatttttaacatacagtgccttgccactagcactttgctgatttttcgccataatggcgtagaccgtgtacgtgctagtatcttcagcgattgggtcaccgttggccgtataaatagtcccacgtttggccgtgatggtctggtcttccgtataaagtttcttggtggcctcgaccagattgaccccgttgacgtggcgcacaatcgcgatatatgaaaaacgaatgatcaaaacaccaaagacggcaatcgcgccaaaaaatagccattggccaaaaattctacgattttgttttggtgaccgtttcgaagtcattcgttgtttgttcttattcatttgtaaacattccttatgctaccgttgttcagcgataacccgtactgcttagcaattttatttaaacggctccgacttgaaagttcactgatttcttgtgcggccgacgtattttttgcctgcacttttgtgactttcgtttgcaccgtctgtaactgactttgtgcgttactcgttgcaatgttcgttgaaactaacataatggctaatccaaacaccaccaaactcaaaccaacacacaatactttttcaaataatgaaaaagcaactcgctgcgtcttgatggacggattcggggtcacaacggtttttgttttatgtaccggggtggttgcgccaggagtttgctgtggcaactcccgcgctaatccattttgggccattttaatcactcctttaattattcctgaatattatttattcgttatctttaaacgttcgatggctcgtaacttggcgctgcgggcacgacgattagcttcgatttccgcatcgctaggcacgaccggtttacgactgactaagcggtaatctggttgcatttcagctgggataactggtaaaccaggtggcagctccggcaaatcgctgtgctccttaaagatcgtcttgacgagacgatcttctaacgattggaatgtgatgacactgacacgaccatgaacattgattaaatcaatcgcttgttcgagcgaagtctccagtacgcccaattcgttattcaccgcaattcgaatagcctggaaaacccgtttagcgggatgaccacccgttcgccgcgctcttgctggaatggcattcttaataatttcgaccaattgccccgtcgtcacgatcggctgaaccgcccgttcacgctcaatcaaccgtgcgacttgtttagaaaacttctcctcaccatagcgatagaaaatacgaaccaagtccgcatagggccaagtattgacaactgtttgagcggttaatttctgactctgatccatccgcatatctaacggcgcatcatgttgatacgagaagccgcgggcagcatcatcaaattgtggcgacgaaacgccgagatcataaactaccccgtcaacatggtcaaggccccgagcatttagttcagtcttcaagttggcaaagttacttttgatgaacgtgacctgaccacgttcaagataagtcgctaagttactttggttataatcgattgcggtttgatcctggtcaaagctatacaagtggccttccagacctaactgttgcaaaatttcacgagaatgaccaccgccacctaatgtacagtccacgtagatgccatccggccggacgtttaacgcggcgattgcttcatgcaaaagtaccgttgtgtgttcaaatgttgccacgcgtgcgcccccttcctaaattattattgttatttaaaaatcaatcaagttttctgcaagatcatcgaagttcgctgcggtctccgtctcaaactgttgccagtgttcggcaccccagatttcaaatcggtcagaaactccgacgatcacacattgcttttccaactttgcatattgtctcaaggttgcaggtatcatgacccgtccctgtttgtctaattcacattcagcagcagcagcatagaaaaaacggacaaacgctcgcgcatccttgcgagttagtggtaaatcatctaactgtgcttgaagcgttgcccaccgttcagcgggatagccaaaaatacaaccatccatcccacgagtaatgacaaacgaagtgcccaatagctcacgaaacttggcaggaatgattagtcgccctttcgcatctaaggcatgttcaaactctccgaaaaacatcttagacgccacggccaatcaacccctttcattaaacataattcaagtctaccacacccccccacttcctaccacatcgttttgttacttttccaaattgttaacaaaatatcaaaaaaagtcccacctaacgttagtttcgttaggtgggacttagtgggggacatttttacgatgttaaaaagaagtggctgccaagtgctaggatatagacgacgagtgtcaataattccgctccccgccaatagagcttaaaaaagcgccagtaaaggatttctccgcgttcaacagcttcaatcagtgttaaaccgatccccaaaatcattagggacaacacttcgtacggtgccagcgaactatccgttgcttgcagtgtcagaaagtgggtgaaaacaattaaaaatggcggccaaaaatccaacaatcttaatccatgtggccaaacgcggtgtgcaacccgtttagcacctaaaatgatcatcgagatggcggctaaaaataccagctgcccataccaagtggtccataaatctcgcatatgcgtacttgcctccccattagtgtcgggttaaattatagagattatcgttaaacttttcaatcatctgtgacagccctataataaacataaactattactggagggatgaccgttgttacaatactttaccactggtaaaaatggccttttgactacgccggacgaccatcacgatcagccatactggatcaacgttgaacgcccgacctcaactgaaatcgaccaactggtcacacaatttgaccttcccaaagattacttaactgccatcctcgacgatgcggaggtttcacgagccgagcaattatcaaccacgcaatccagtcaaccaatcttaatcgtgatgcagtatcccaaactcacgacgagtaagctgggttaccttgaatttcaagtctatcccttcgccttgattttagtggatcaagtggtcattaccgtcagtaattacccggctagttttattcaagactttgtgatggacccggcctcttctaagctaagtctggataatcatgaagattttgtgctgactatcatgtggtacatcgagcacagttttgtgaccgcactcgaattgatcaaccaacggacaagtgccctggaaagccgtttgaatcaagctactcacaacgtggaactctttaccattatggcttaccaaaaatccttgattcgttttaaggccgcccttaatcagaacacacccacgcttgacgcggttgaaacttcgatcacccatttcaacgcacctaatcaccaatcactcaccgatgacattaagattgagacccagcaagcgagtgacatggctgaaacgaccaatcagattttgcagcaatatagtcaattagtgggttcagtaatttccaataatttgaatgatgtcatgaaatttctgacctcactcacgatggtgttgacgattccaacgattatcggtggaatctatggcatgaacgtcaaattacctggtgccggtctcgtccacgctttcacttggctgatgctaggaacgattattctttgcattattagtatcgaatatttacgaaaccatgactatttttaatttcaattgaaaaaaaactgattccacgttaaactatgaaagaattactcgtaaagtgtggtgcatacaaacataatgaagaaaaaatcaacttttcaaaaaattacgatggtcgttatctggttaatgatcatttctaccattgggtcattggtgcttaccgccttatctgggttaggtttactaaccttctaggttaaacaccttgcgaaccacgaatggttgcaatacttaccaagaaaaaagttacgcttgctcacaacaagcgtaactttttttattactggtggatcactcagccatggtcggcaagcctagccaccaacttctgagacaatgtgaattaaaaaaatcacgcatttgtctctgaaaaaggttccaaccgttagtcaaatctggctaacgattgaaacctttactttaacgtcgattattcaatcgtatcggcagcgccaccatgtgaagtcatgccattcaaatgatgcccaccaatcttactggacgctaagcgtcattacccgacgcgggcgcttcgtcagccgatttttggcggtaaaccttacgtggcttactcccctccgaagggcccaccacgccgcgttcctccatttcgtcgacgatccgtgctgcccggttatacccgatacggaagcgtcgttggagcatcgagacactggcggactgttgatcagtcaccaattcaacggcttcggcataatactcatcctcaccgtcacgagggtccccactaccagcggcatccgtctcgtcatccttgaccagcatactatcgtcataatcagccgtctgttgggctttgataaagttgacaacttcttcaacatcatggtcagaaatataagcaccctgcacgcgcagtggcttattcatgcccattggctgatacagcatgtccccacgaccaagtagcttttcagcaccgttactatcaataattgtccgcgaatccgtcccacttgaaacggcaaatgccatccgtgacggtacattggctttaattaatccggtaataacatctaccgacggccgttgtgttgccaaaatcatatgaataccggctgcccgggccatttgacccaagcgaataatggcatcctccacttcgctcgaagtgaccatcattaaatcggctaattcatcgacgaccaccacaatgtatggtaagacgggccgtgactgcccatcagccgcattttgttgacggatatattggttgtacccctgcatgttacgctgcttggaatccgcgaacaattcatagcgtcgctccatctcggcaacgaccttatgcaacgcccgggccgccttcttcggttccgtgactacgggcgtcaacagatgtggaatcccattgtaaacccctaattcaacctttttagggtcaatcagcataaacttaacttgacttggtttcgtgttcatcagtagccccgtgatcatcacgttaatggcaaccgacttcccactcccagttgaaccagcaatcagtaggtgcggcattttagacaagtcggcaacgactaaattaccagaaacatcacggccgagcggtacggccaacggtttggtcgggtgcgctggttgggcctcaacgatatcccgaaatgacactgttgaaatctgtttatttggcacttcgattccaatcaatgatttaccgggaatgggcgcttcgattcgaagatccttcgctgccagcgctaacgctaagtcgtccgctaaattgacgaccttgctgaccttgaccccaacagctggatgtaactcatacttcgttacggatggccctaagctgacattcttcacttcaacttgaacaccgaaacttgccaacgtggttgttagcttctgcgagttactctcaatcgttgcgtactcagcactctgatccgtttttggaatcttcgtcaatagtgttgactctggcaactggtagtccgcatcatccatcacttcagtcccttggagttcttgttcatgatcaaccgtagcagctgaagttggggattttatgggcaaggcttcacgatcactagccaccgtgatattcaagtcggcaggcgagctcgtaactgcactggctgctgagtccggcgccgaagtcccgctcgttgtctcagcaggggctgctgactgtggtacggttgacgttggctgcttctcagtacttgccgcttgattggcgcgcacttgttggtgaacccgccaacgggcaatttgaacccggagcacgtgcgtcagccattcataaccggatcgcagttgctggcccaattgcatcaaggcctgacgcaacgcttgcatcgtcttatggaacggcaaatcaaaggtaatgtagatactggcaaccatcaggatcagtgcgatcaaaattgtcccgacattagccaatagtggataagtgacactatagccagcagcgccgactaatccgccaccaagattactggccatgccccccttggcaaaatcatttttgatcagattccacgtcaacgaccaaaaatcggtatggtgattcaattgattaaacatcgggatctctaatagcaataagtaactgaagaaaaacaagttaccaccgacccaccaccgccaagtcagtcgtggccaccgaccaaaaatcatcaaatatcccatgacgaggagtgttagcccggcaaaaatctggtaggcattcccagcaatggctcggaaaaactctgcgaataccatgcccactaaccccaccttcaacaaggcgaggatcgtgaccaatagtccaatcaggccaatgacattccccgtcatctgccgcttagccgcaaccgtcggcttcttcttgcgcgtcgaggtccggcgcttttttgttgttgcttgtctacgcgccacgcttcgttcatcctttctcaattaatactgtcttcattataacaaactcaagttcccccgtccccatcaaaaaacgcaccctaacgtttagcgctagtgcacgttctgttggttacttcaacttatcattttcatagtggtgcgaccgttcaaggttcgggaattgttgttgccgcagggcttcataaatcacaatcgcagccgaattcgataaattcaaggctcgaatatgtgaatcatcttgaggaatccgaatggccttttcgggatatttgcgcataaatggttctggtaaccctgtcgtttccttaccaaataagaaatagtgatccttacccgtatcactataatcaacatccgtatagtcatgttcagcaaatttagacactaagtacaactgatttaaatcagggatactagctaaaaaatcttgcaagtcagcatgataagtaatatcgacactatcccagtagtccaagccagcccgttttaagtgcttatcatcaattttgaagcccaacggttcaatcagatgcaaggccgtatccgttccggcacacgtccgggcaatattaccagtattcgctggcattaacggttcaaataacgcaatgtgatttgtcaaaataatcgtcctcattcatattagtctctacgccatgttcattcatagcaatcctattaatcataccatgtctatggttcaacagcgaactttgaaactaaaaaacgctttgttcgcattcttaaccaatctttcctatactaatcaccgtacgcgccggagggcggaacaggacgcacactggctgacgaacaccaatctaaacctgacacgttgtcatcatgattcatgccggattaacacgtacaaggcagcattcggatcattttataactcgaggaggaattatctatgaaaattatgattattggcgcaaccggaatggctggctcagccatcaccaaactagcacttgaacggaaccacaccgtcgtagccatcggacgttctgaagaaaagctagccgctctaccggctaacccaaatttgcagaccaaagctaaagacgctttcgatctcacactatctgagctacaggcggttgacgtggtcgttgacgcaatggcgactagtcctgataaggcttaccgacacgtggatctggcaactaagctgatcgctcagctccgcgaacaacagcggccacgtctcctcttcatcttaggggccggtagtttaacaactggtgatgatcaacacctcttcgtgcacgacattgaaagtaatcccgccaatgctgccttcgtcgccattccgcaaaaccaactggccgaactgaccttcttacgaaccgtcaccaacgtcgattgggttggaatttccccggccgccaatttcacagcaggtcctgctaccccggcccagtacggccatgacacattactgacgaacactactggtgaatcagtgaccaatagtggcacgatggcggtagccgttttaaacgaactggaaacgcccaaacatcatcaagaacgctttacagtcgctaaccagtaaacgtcttgcctagcagcgctaaaatatcgagtggcagccaaaccacaagccgagcgctacttgagcaatttagttaactgtgacgcgctttaaataagaccaattaatcccgccagaatctgacgggatttttgtggcgtcgcaattgctggcagtatttaacagctaagtgctgccaccgccccatctctcctcattgcgacagtcgtagccaacattgtcactaaccagttggttgcattacaccgccagttaacgccctcaccgacctttaattaattcttcaccaaagcatgctaaactattgccatgtttatttgaaagtggggataccatgaataaccgtttatcaggacggaatttactcttcatcggcaccatgttatttggactatttttcggtgctggtaacttgatttttccaatttttctgggccagcaagccggccaacacgttggtgcggccattatcggactattgatcaccgggattggacttccattactaggcgtgatcggcatggggctgacgcgcagtcagggcgtatttgacctggcaacaaacgttagccgatcatacgcgtatgtcttcaccgtactgctttactttaccctcgggccactttttgcaatgccacgattagcaactacggcctttcagattggactggcccccttcttaaccacccaattacaacccgtggtgctattgggcttctccgttgcttttttcgtcgtcacttggttactggctcgtaatcccggtaagattatgacctatgttggtaagtggctgacacccatctttttgctattattaggtgccttaatgcttgtcgctatcattaagccactgggatcacttaacgtcgcggcgagtggcgcctatgtcagccatccagttctaactggttttactgaaggctacaacacgatggatgcgttagcctcgctagcttttggcatcgtcgtgattgatgcgattcgcgacctcggtgtccgtgatccggggcaaatcgcaactgataccattaaagcaggtctaatcagcatgagtttaatggcagtcatctatggcctgctggcgattatgggtaccatgagcttaggtcgctttgctccagctgccaatggggggattaccttagctcaaattgccgatgcctacttcggccgattcggtaatgttttactagctctaattgtcatcatcgcttgcttaaaaactgccattggcctcacttctgctttcggtgatacgttgcatggcatgtttcctaagatttcctaccattggctgatcaccatcgcttgtctcattccagccattcttgctaacgttgggctaactgaaatgattacttattcaaccccagtgctgatgtttctctacccgctcgcaatcgtgttaatcatactggcagtactggcaccatggcttgggatgtcccgctggttatatggaatgacaactgtctggaccatgattcccgccattcttgccggcattaacgctatgccatccgcctgggtacaagcatcctggttgcaagctttgcttcatctcaacgcgtggctaccgcttgccaatctagggttaggctggagtgtacccgcactgctaggtttcggtttagggtggttgatcagccgtaaacaaccatctgcttctaaattgcattaatatagcgtcacatataaaatagcggaccttctgatagccatccacgacttttcagaaggtccgctttaaattacgagagccatgccaattgactggttgccattgaacctcaccggtgaatcatggcattattcaggactggtatgaatgcaatagcaacacatggtcacacctcaccgtcagcttttgaagacacaaaaaaacgtagtatttcggtgtgggcacggcgaaacgctacgttaatgaagtacaactcggtagtcaccaacgacatgtcgatgttaactaccaaacgatttctcaaaggttatcttaacaccggcgtttcaatcatgcaagcacccgcgctaacctttttgcatcgttaataaactcacatcaacggtaatcttagttaacccctgccgtttagcggttgcgagctgctcagcatccgcaccccagtgcagcggtgtcatgactaataagtcgttaaagtcaatgttatcaagcgcaacttggtattgaattcgttgccgcttagcagtgggatagtgctgggcaaacagatctaacacccgttgattatcatactgatactgtcgatcagtcggtttaaatagtaaatgacgcagttcaactaagtactcaggatttggcacgatcttcaataactgtccaccgggcgcaaggacccgttcaaactcttggtaagcggatggtgagaagacatccataatggccgtgaatgccccatcggtaaagggtaattgggccaaatcggccacacaataataagcagtcgtcgtcaattgggtcgctaagttaaccccatccttactaatgtcaaaaccaatccccacgtcttcagaattggcatgcattgtcaacaaatcagctaggggggtgccttcaccgctaccaatatctaagattcgttgcgccgtttttggcaatgccgcattaatggcttggacaatggggccgaaaaaaccagcttgcaaaactcggcgccgcgctgccagcatgttagcatcgtattcgctagcgacttgatgcgtcagaaaatacaacgtccctttttttgaaaaatctacttgatgcccattaggacaacataagctgtggccgtcaattgtcacatatgcttgattacaaactaagcatcgaaagcgatcgatatttgcctgaacaaactggatgccgcggtcaatttttttcacaggtgtcaccttaccttggttaattttatcattaggcgtcccatatccaagcgatgctttccagcttacctgaaactatggattcacgatgacaacatcgtgtaaaggacgtatgttcaatcataccatatcggggcggacaaaatagtagctgttacgatttaggtgtggtatcttattaactgttctaaaggctgacttaaattgtcaaaatgaatttgctaccgaatggcatgaatttaatgacataaaggagactcattcagatggcaaagaaatcaaaaattgcgaaagaaaaacgcatcgaagcaaccgtggctaagtatgccgaacgacgccaagcacttaaagctgctggcaactataccgaattggcaaaattaccacgtaatgcttcacccgtgcgtattcatcggcgcgactcacttgacggtcgaccacatgcttacctacgtaagttcggcatgtcgcgccttaactttcgtcgcttagcgcacgctggtcaaattccaggtgttaaaaaagcaagctggtaaagtgacaactggcgtgatattcactaatgattagtaacatcaccattcagttaaattaaaaaggttccacagaattgtcatcagacttctgtggaacctttttaatttggcgttattggtttaatcgcgtttcagcgccatctgagtagccaacaattaccttacttgttagtttgatcagttgatggggttgcttcagcctcatacaatcccgaagaccgtcgataccagtcaaacagatgtgtccacaaaactttcaagatcgcatagcctggaatcccgaaaataacccccatcaacccgaagattttaccagccgctaataggacgactaaaatcgtaatcggatgaatagctaagctactccctaagactaacggtgagataaagcggccttcaatcgtttgttcaatgacgaagacaatcagaacttggaccaacatccatggtgaggtgactaacgcaatgaccactgaaggcaccattgcgagaaaagaccctaaatatggaatcaaatttaagattccagccgcaattcccaacgtcagcgcaaatttcaagccaataatactgtaaccaaccgcaaacatcacggcaacaaagaacgccacggtcaattgaccacgaatataattactgacctgtgaattgatttctgtcaaaacttctaagaatcctgagcgcgctttggtaggtacaaacttagccatatacttcggtagttgatgaccatcgcgcaataggtaaaaaagaataaacggcattgttatcaacccaatgatgacggtcgttacggtactaaatacgcctgtaagtgaagtcaccgtcccggtcaaatacttcgaaaagcggccactcactagcttactgagatccgtgttccaactttcaagttggtcacggatactactgagttgcggatcattgagccagcgattaacttcagtactggcatttttccaataattgggccagtcattgataattgataaagtttgatcgcgaatcgttgggataatcgcaataatgcctaacgccaacagcgcgacaaccacaataaacaaaccaatgatcgtccaggttcgtcgtacgcgaaaacgcttttctagccagtcaacaagtggattaagcaagtagtacagcacaccggccaaaataatcggcaaacccacgatgctaaaaaattgccggaccggatctaatagccaatcgacttgcttgcccataaagaagatcgtcaatactaataaaataacgaccaaaatccgaatgagccgttgcgctgaccaccgttgtttctgtgaatcaggtttcaaacaatccctccttcctaagcctgatacgtaataacgctaccgaccttgattgttggtaactggtttggtgtcaaataaatgccgttttccattggtttggcaggtactggtttgaagtacaacgtcgcgtgcccaattgacgttaaattagcttccactagtccccctgcaaaggccaccgtataagtttgtcgatcgatcgtaatggtgctaccagcaactaacgacagactcgcgatgggctgctcaaatttctgaatcaccgcgatttgctgtaatggtgccgtggccgtttcatcgaataaaactaaaattggttccttggaatcgatagcactcgcaccaatcgattgtactgttgcagttattgtcatattgagacccccatcggttaattaattgctttaattgtagcatagtcctaatcacagacgccaatttgtcatcgcttacacgggccatatctatgctatacttgaattatctatcaaggaggtttgttatcatgcaagaacgcattttattcggaacatatacgaaaaaaacaagccaagggatttaccaaggaacccttgacaccactgccaaaaccttaaccaacgatggcttactggcagccactcaaaatcccacctatttggccctctcagctaaggattgcctatacagtgtcgataaggaagatgacgagggcggtatcgctgcttggcaaatcgacgggcaaactgctcacaaactaaacaccgttgtcgcacctggcaccccaccagcttacgttgctgtcgatgaggcccggcaactcgtctacagtgccaactatcataagggaacggccgaagtcatgaaaattgctgctgatggcgcgctgactttgaccgatactgttcaacatagtggccatggccctcgtcctgaacaagacggctcccatattcattacaccgacctcacgccagataatcgcttagccgtaatcgatttaggtagcgataaggtctatgtctataacgtcagcgacgccggtcagttaagtgaacaatccctgctcactatggaagctggctttggaccacgtcacctcgtgttcagtccagacggccaatacgccttcttagctggtgaattatcgagtcagattgcgagcttaaaatatgacgcccaaactggtgcctttacgcagcttggcattgtgaagaccattcctgccgactacacggcgcacaacggtgccgcagccatccgcttaagtcacgacggtcattttctctacgtctccaatcgtggctacaatacgttagctgtctttgcagtaaccgccgacggtcatttgaccctgattcagcaaatcagtacggaaggtgacttcccccgtgattttgatttagatccaactgaagcctttgtcgtggtcgttaatcaaaacactgataatgccactttgtatgcacgcgacttaacgagtggtaaactaagtctattacaaaaggacgttactgtgcctgaaggcgtttgcgtccgtttctagtaaaggatgaaactcatgttattaaaagaagtctgtgttgaaaattacactaacattcccgcagccattgcggccggtgccaatcggatcgaactcaacgataacctatccgttggcggtacaacggtcagtcgtggtgtaatggctgaggcagccaagtataccagtgaacatcacgtgcccctagtgaccatgattcgcccccgtggtggcaatttcgtttataatgatacggaattaaaaatcatggaagcggacctgctacaggctcaatcattaggtgttgatggtgtcgcatttggtgctttgactgcggataatcagcttgacgaagaagccttagcgttactaattggtgcagccggtggcatgtcgatcaccttccacatggcttttgacgccatccctgaaaatcaacaagccgcggcaattgactggttagtagaccatgacgtcgatcgcattttgacacatggcggcccacttgatcagccgattgctgactgtgtcccccacttgcaaacgacgatcaaacaggccgctggccgaattcagatcctacctggtggtggcattaccaccgccaatgtcgccgacatcaccacaacgctcggcgtcaaacaggcccatgggaccaagattattaattactaagaactgccaaaaaggcgcatctcattttttgagatgcgccttttgattggcgaagtaaactaaaaaattagaccattaatcacggttattcaatggtctaatattggcacaagcgcccgcactaagccaacttgccctgagccctcttccgcgaacaaattggtcattgtcaacgctgatcaattggctcgtgttcatcatcaatcatgctaattaggataaacataaaacggaccaaatcttaatggtcactttatgaattggcacgttgattatgaataattaaacggttaagatcagccggtaatggtgcaaaggtcgtgagggtctggctaatgaatggatcatcaaattccagttgcatgcagtgcagtgcttggcgctgaatccacgggtcacgaggaccgccataaagggcatcaccgatcaatggatgaccgctagctgcaaagtgcacccgaatctgatgcgttcggccggtatgcagccgtacccggacgactgtcatgttacgcagccgcttgaccacccagtactcggttaaagacggcttaccgtcgggacgggtcgttcgtttgataaatgaatcagcggcacgaccaatgggcgcatctagccacccgtggtcagtcgtcaattcaccactgacgacggctaagtacattttgcgcatcgcatgggccttcaattgatgatcaataatcgaatgggcaaaatggtgcttagcgaagagaacgataccgctcgtatcccgatccaaacgcgtggtgatatgcacaacctcattatcataatgggccgcttgataataaccttttacccgattcgctaaggtattgtcaggtaaggcatgcgccggtactgaggccactcctgctggtttattcacaatcaggtagtcacgatcctcatataagatatcgatcggcaacgtcgagacgcctaagtggtcattaccaatttcagcaggtgtgaccatcgtcacagtctcaccgcctgtcagcatatgaatcgctaataccggtcgttcatcaacgagaattgccccaccatgaaacttaacttttttcaacaaactacgtgtcacaccatgttgtgccaagagtgtcttaactttcatcggggtcgtctcatggttgatccaagtaaacctcattgctcgtccaacccgatgaaggatgtcccgacccgttgccagaagcgattatgacgatgctgagcaaatgcaattcgacgattagcaattgaataacgaatttgttcaattggccgcggctgcgtatccatttgatcagctgtaaagacaaagtgtgactgctgttgtggccgaatcgttattgtttcatacggcgctacgatgactggcgagcctaatgttcggaagactcggttgttgatcgacgcaatctcggccatttgtaaagcgtccaagcgcggatgaatgacagcaccaccaactgacttattataagccgtcgaaccagttggagtggagacgcataacccatcgccacgaaaacgttcaaatagttcatcttgaatataaacatcggcaaccatggtactcccaagcttcttaagcgttgactcgttcaacgccaaataatgatcagtcgcatccgtatccgcataagtaatatctacagctagcaagggataggtcacactctggccgttgtcttccagtaaaccgttgatcagttggtcgatttcataatctcgccagtccgtatagaagcctaaatggccagtatgcacgccaacaaagcgaacttggtcaaccatgtgactatagtggtgaaacgccgctaaaagcgtcccatcgcctcctaccgacaaaacaatgtctgggtgctcatcatcaatttcaaacccggcagccagcagtttagtatgtaactcacccgctactttcttggtcttggcactcgcatttgcaaaaatcgttactttcatgaattttgatcttcctttgtcgtgtcaggctcatcgttgcccggccccttcccatacgagaacaagctctgagcttcttgaatttcctcacgaatttctgacatttctttatccaaactaaaggcggcttccgcagcccgttgtaatcgttgactcaagttttcagggaaatccccttgatatttatagttaagcgaatgttcaatggtcgcccagaaattcatggcaagtgtccggacttggatttcggccaaaattttcttttcaccaccgaccatttggaccggatattcaatcacgatatgatacgaacggtaaccagatggcttttcattactaatgtaatcgcgttcttccagaattgtcatatccgtccgttttcgcaataaatcaacgacctgatagatatcctcaacgaattgacacataatccgcaaaccagcaatatcctgcatatcttgttctaggcgatcttcttgtactttacgtcgggtcatcttttccttaatgctatcaacgggtttgacccgccccgttacaaattcaatcggttcatgctgattcaaatcacgaaattgtttgcgcattccccgcaatttaactttaagctcatcaacggcttgctgataaggcagtaaaaaatgattccaatcttccatcggggcacctccgtttcaatccataccctaaaattttaccataaatcgtcggaataaaaagttaacgttctcgagattgaaccctaagttcactttttttccaaactgtaatcctagaaacaaaatactttacgaatttagcaaatcggtgcatgattacgggtgaaggtttaagctaagtaacgagtgattttctgcattaaaaaatttatgaaatgaaaaacttgcaaatacctcgtttgattggtattctgcactatgacgcgaatagagaaagtggaggaattataacgtgttagaagtgtatttatttgtaaatccgttggcaaaccaatgcgtacgtgatgagcaaaacgtgttacggttggcaaacgactcagacaagcaaatccaatttcaattcgtaccattactcaatattaatgtgattcaacgggctctaaagtgccaaggaatcaaggcatccgactggcatgctcaaaatcaacagtctcaaacattgtaccgagttattttggattataaagccgccctttttcaaggcaaaaaacgggggcgtaactttttaattgccttgcaatctgcaatgctcaaggctggtcaacactattcggaagagctcgtcaaaacggttgcaactaactgtcagattgacttagacatgttcatggaagatcgggacagtgacttggcgaaacaggcctttcatgctgatcagcggcttgcatctgaaatgaacattaccgaagcatcgtcggccgtcgtttttgattgcgaccaatatgattatggtgtcttgctagaacattttaattacacgactctttttgacttagtcaatggcaatctggatccttttcaagatgcaactcgggcaaccaatgccagctgtgctagccttgccaacgcacaattacacgttttataattccagtaattgcaattattcaactggtcctaccagtcaaaagcacccgacgatcattttcgccgggtgcttttgactgtatttaccttttatagctgccagaataagccttctggactcggcagctaacaccctaactgataagcgggtcaggtgtaaaataagcgtcgggaccgaacatcctgacgctcattgtgcttgcttttataactggttaatcttgggtgaccaactgttcaaattcatttaatcgttcttcaaatacctcgaaagctgcatcaagataatcaggcttggtcatatcaactccagctcggtgcatgacatcgattgggaaagcagatgaaccagctttcaagtaaccgagataatccgcaacagcatctgtctgttgcgtactaatacggtcagccaacgttgaggccgctgcaaaacccgtggcatactgataaacataataattgtaataaaaatgcgggatacgggaccattcgtcggcaatttgcggatcactgacgacggcgtcaccatagtagcgttggttcaactgcaaataatgttttgacaagcgatcggcagtcaaagcctgaccttcttgatcttgctcatgaagccactgttcaaactcagcaaattgcgtctgccggaaaacggtgcctttaaatccatctaagtagtaattcaagacatacgcccgcatttttggatcttgttcagtcgctaagaaatagttcgtcaacaagttttcattagtcgttgaagcaatttccgccacgaaaattgaatagtcaccatactgataaggctgatgatgtgtcgtgaagtaagagtgcatactgtgtcccatttcgtgcaccaacgtatataaattatcaatattatcctgccagttcaacagcatgtatggcgcggtatcatacattcctgacgaatacgccccgctacgtttgccttgattttccaccacatcaatccaccgtgaagcaaacgctgttttgacgtgtttgagataatcagagcccaaaattttgagcgcttgtaaagcagttgcttgagcctgctggtaggaatagttggtcgtcggcttgggtgccaatggcgtgtacatatcatacatatgcaactgatcaactccgagcagttgtttccgtaacgcaacataccggtgcaataagtccaaatgcttgtcaacggacgtgactaaagaatcgtaaaccgccgtcggaatctgattggcagcaagtgctgccgtccgcgcatctggataatgatgagcctgggcaacaaaattgtgtaccttgacttggctagctaaagtcgaagcaagtgttcgccggaactggccgtatactttatacagtgcttcaaacgcctctcgccgaacagccggatgaacggactcaagtaacaccccataaattccttgtgacaatttgacagggttgccgtcgtcatcctttaccgttggaaattgaaagtcagcgttattcagtacaccaaaagttttcgcagaagcaccaaaaatatcactagcgcctgcgagtaaagcttcttcgctttcagacagaacgtgtcccttttgcaaccggatcgtatccaacaaatgccgataatcacgtaaatcgacgttttcatcaaggtacgtatccaattcgcccggcgttaattccaagattgctggttcgaaccaggcagtcgctgcggataccttggcagtcaaactactagcttgatcgtctaaagccgcattggtactattgccagtatcctggtcacttttcagacttgcgtataccgccactttctctaaccgacgatacagcgctaaaacagcctggatgccagccagcaccgtgtcggccgagcttgtaaacgtttctttaagcgcagtgacggtggggattgcagctttgacttgtgcaatatccgcctcatacgcggcctgatctgcataaatgggcgtcaaatcccacgtcagttcttcaggaacggccgaacgggtcggcaattgtttggttgctaccatgcaaattcctccaattatttcaatatagcactagattaccacagattgcgcctatcgcggtagcatctgttccggaatcaatgtttgcgccatcgaagctggccggaattcacatgccactcagttttctgccagtttatcacttgctgctcgctaagcatcgtaatcatggtcgttatcagttgttgtattaacgtgcctcgtgcttgcaggcaggcacgccgggcaagtaatggccgtaattgggcccagatcaatgcctctaattgtggcccagtaagccgtccggactgttgccgcagtgcaaaaaagacgtgggcgtgccagaccagatatggtaccgataacagcggtagttgcggcacagtgggcatcgtccacgtcggtaactggacaatcgttcctccgcgttgatagcaagccacttgtaacgcatcaaaaccacgttgatgtcgaagccgtgccaacattaactgttgataataatgccgtaaatgcgtgtccggcaaagttggggtgttaattttaggagccaattggcgaaaacgtaacaccgactggctgcgcgtatccagtcgaatcgtttgataggtcagcggttccgtatccaatgtcaagacgtgatgcaataaacgaacactagtactttgagtgtccaaaaaaagtagaaacaggccccaccgttgctggtactgcaaaaacttcaaagccttgctattgaggtgcaattgtcgctgataggggcgtcccaacaaccataacacttgatagccatgctgacgatagccctgcgtccgagctgcgagtcgctccactgacaagggtgaacactgaaattctaacgcgagtggttgcgctgtacctcgtcgaaccaagatatccgggcgctgatgtatctctggcaaaccagcctctaagcgcaccgtataaccactggcagcgaaccaggtcgctaattgttgtttaccacgaagatgttccgttgtttccccttcagagaaagcatcacaatccgtggcatggacgtgggcaaaatgtggcacgatcactgccccccgtttcaatcgcaccggctgcacacattctggacagtaatattctatttggcgatcagccgtcgccgcattaacgagttgatgctgggcatccatcgcgatcaacatgatggtccctcccttcaacaactaattacgtcattaaagccaattctcacgcaaacccatcatcatttattgaccccgagcagcacccgtcttttggcaaagcgtccggcaggcagattgtttatccgtggatacaaaaaagccttaacattacgaataaacgttatgttgaggcaattaactgctatttaaaatagtgccggatggtttccaaagcagcattagacatgatcttttcaccatgttcaagtagtacgtcagctgaaatattagctaaatgggcatattccaaggctactgcgacatcatctttgatagtggccgttgatgattgatcgacaaagaaaaccagttctagataatattggtcgcgatacttgaataagttagacgcgagtccctctggccggaataattgtgccaatgaaacaagatcctcaaattgatcgaatttcaacacgtattccttagttggtgtatcaggatcatccaaatacggatcgagatcattagtgtccttagttggattatgtgcaataccttgtccatcttcaacctgattcgtatccgtctgcatcagtttacgcttcaaataatctgaaacatcatcttgtgagtcgctatcatccgattggtcgggtgactgagttgctttagcaatcgtatcttgtaaattatcactgtttttgctaataaataattctaaaccatttcggtttggtaatacttggaaagttacggcatcattgtcctgaaattgatgatcaacatcaacttcctccaagatgctatagaagaaactttcaatttgcttatgattccctagtaaatctagtacgcgaataccgcgttcattgagatcatcatttccaataacgacgcgaatcgtatcttcgttgatgcgttccatctccattacagatccacccctttctaagtgtcaagggccataatcactatcacaattctaacttatttcagtttattgtaaagtaatctatctgaaaatacaaaaattggccaattagttaagctaactagccaatgataatcacatatttgctaattgttgtgcccgtaataattctaatgtccgaattcttcgtggcaagaagcggcgaatctcgtcctcattgtaaccaacttgcagccgcttctcatcaagcataattggtcgacgtaacagactaggatcatgagtaatcatgtcaaacaattcattgagtgacaaatcattaatatcaacgttcagttgttgaaaggcctttgagcgagtggaaataatttcttccgtccctgattcagtcagttgtaggatctgcttgattttttcaattgaaagcggttcggtaaacagattgtgttcttgaaaatcaatgtcgtgtgtctgtaaccaagccttggctttgcgacatgaggtacaacttggtgcggtatataaaataaccatcctgggtcctccttggcatcgttaatcaattttataacataattcattatacgctactcacttttaattgtgaataggtttaacaaaattaatttatttaaaactaataatataaaatacaattattcgatatatgtattttttctattgaataaaccgcttttatagtcattcttgttattaattaattcgtatacaatttaattatgacttatgatatcaataatctattaacggtaaactgacagaaaaagcttagcaaaataatttgctaagccctatcatactagccaagattcaattgtaaaaacttttgagcaactgtcacttgaatgtcattaccggcggctgcttgtgcttcttgttggagttgtgtaaatgagacatcttgtggcaagtgtgtgagcaataattttttgacgcgggcatctttggcaattttaccagactgtgccgacgtcatatgccacattttaccagttttatctgcggcaaaattcgtatcagtcatcaataactgtgccccggctgcgaaagtcgctaattctggcaaataagccgtatcggcggaaaagacaagttcttgccccgtcgctcgctcgaccaacttaacggcataggctggaactggatgtttagtcggtaaaaagctcacatcaaacggcccaatttgattgacagcagccggatcataggcccgaccttctgtggcattcgcccaggtcaaggcaccaaagttaagtggatcagcggtgtgcccgtaaatcggcagcacgggcgtcttccgttcaccagcacgcaactgccagtaatattgtaagaccccaacgtccgccgtatgatcgtgatgataatgagtcaggagcacactatcgagctgtaaggggtctaaaatctcttctaaggcgtttagcgcccccgacccacaatcgagcaataaatggtaatcaccggctgtaatcaggtaagaactcgtacccacgccatcgtatggataaccaccatagtaaccaagaactgttagtttcattattgaccatcccttcatttctctgtccacttctattttaatatagcaccaagaaaaaatgaaaccaacaacttaacatattttcaattattttgaaaaacacgtataataatagatgtaataaataaggagtgatattgatgagtggaaagattgcagcaacatttgggacacgtaaaattctaaccatgatccaacaacaaaatgctgatcgtgacttgttattaatgcaggccaacgccactgaagatcgctatatgctactcgatttaaccggcgaaaaaaccgttttttcaagccccgtaacgtatgacgttttactttcaaaaggatcagctgactggcatggaatgacaagtttcatcttcattgatttaccggaagaagaacaaaaagtctttaaatctaagtttagtagtttccgacacgattataataagccagatgggctgaaacatttttggatcttacgtgagtccaaaaataattcagccttcgtgattgtcacaaattggcatagcgactccgaatatgctgtttggctgcgaagcgcttcattcaagccatttgccaagtacatcacctcagattacggctaccacgaaagtcgctattcatttgtacgttcattaaaatcataatcatccggtattggatatttcaagtcgctgcagtgattgaactgcaacgacttttttcatgaatattacttttactcaacactgctaaatctcatcagttgatatataagcctcgttcacaacatcacatcgcagtcagaaccaacatatgtcccgatcagtgtgatcctaaagaatctgccgtcagctttagttgagcaatcgtgagcccaatcagccatctgttgaatgacacccaccctatttactgattacagtgcgcacctctttaggtgatctcgtcaaacagttaatattctgaaaacacaaaaaaacgtcattcatcaacgaatgacgtttgtgacggtccgtacgagactcgaactcgtgatctcctgcgtgacaggcaggcgtcctaaaccaactagaccaacggaccaattgcgggagcagggtttgaacctgcgaccttcgggttatgagcccgacgagctaccagactgctccatcccgcgataatataatgacccctacgggattcgaacccatgttactgccgtgaaagggcagtgtcttaaaccacttgaccaaggggtcatatttttaaatggtacaacggagaaggagggattcgaaccctcgcaccgcttgcgcgatctatacccttagcaggggcacctcttcagccacttgagtacttctccaaaatgggcctaaatggacttgaaccatcgacctcacgcttatcaggcgtgcgctctaaaccagctgagctataggcccaaaaaaagcgggtaacgagaatcggactcgcgacaacagcttggaaggctgtggttttaccactaaactatacccgcagaatacagatatggcgcgggacggaatcgaaccgccgacacatggagcttcaatccattgctctaccgactgagctaccgagccattgtagccatttagaactattaacttaacggtccgtacgagactcgaactcgtgatctcctgcgtgacaggcaggcgtcctaaaccaactagaccaacggaccaaattgcgggagcagggtttgaacctgcgaccttcgggttatgagcccgacgagctaccagactgctccatcccgcgataataaggaggatgagagattcgaactctcgcgtggtttgacccacctgacggttttcaagaccgttcccttcagccagacttgggtaatcctccatatgatgtaactaggaaatgtccactattaatagtagatggaccttgtagggctcgaacctacgaccggacggttatgagccgtctgctctaaccaactgagctaaaggtccaagctctaattcctatcgcggcagggggaatcgaaccctcgacctcccgggtatgaaccggacgctctagccagctgagctacaccgcgatgtgttaaataatcgtatatgactacttaatcgggaaaacaggattcgaacctgcgaccccctggtcccaaaccaggtgctctaccaagctgagctatttcccgttatatgcacccagtaggagtcgaacctacaaccttctgattcgtagtcagacactctatccaattgcgctatgggtgcttcataaaagtgccgaggaccgggatcgaaccggtacggttatcactaaccgcaggattttaagtcctgtgcgtctgccaattccgccaccccggcaacactttggaacaaagcggaagacgggattcgaacccgcgacccccaccatggcaaggtgatgttctaccactgaactacttccgcataactattcagttaatgccgactagaggattcgaacctccgaccccctgtttacaagacagatgctctgccagctgagctaagtcggcatgacgattaacacaactataacatcatatcatgctcagttacataaatcaacaataacttttgtgaaactatttaattatgagccgtgaacaatgagccgtgacagtctcgaactgtcgaccctctgattaaaagtcagatgctctaccaactgagctaacggctcatgatggaggatacagggctcgaacctgtgaccctctgcttgtaaggcagacgctctcccaactgagctaatcctccaatttcgcatggcaacgtcctaccctcgcagggagcgatcccccaactactctcggcgctaagaagcttaacttctgtgttcgacatgggaacaggtgtatccttctcgccatcatcaccacactatgtgaaactaaatattaaattgaataatatccatttaaccttgcggttaaatgagccgtgacagtctcgaactgtcgaccctctgattaaaagtcagatgctctaccaactgagctaacggctcatgatggaggatacagggctcgaacctgtgaccctctgcttgtaaggcagacgctctcccaactgagctaatcctccaatttcgcatggcaacgtcctaccctcgcagggagcgatcccccaactactctcggcgctaagaagcttaacttctgtgttcgacatgggaacaggtgtatccttctcgccatcgtcaccacactattgagaaacttgtgctctcaaaactagacaatatcaaatatcttcatatgaaccggaacaccaattacttggttaagtcctcgaccgattagtattagtccgcttcatgcgtcaccgcactgccacttctaacctatctacctgatcatctttcaggggtcttacttccataaaggaatgggaaatctcatctcgaggtgtgtttcacacttagatgctttcagcgtttatcacatccatacgtagctacccagcgatgcgcctggcggcacaactggtacaccagaggtatgtccatcccggtcctctcgtactaaggacaggtcctctcaaatttcctacgcccgcgacggatagggaccgaactgtctcacgacgttctgaacccagctcgcgtaccgctttaatgggcgaacagcccaacccttgggaccgactacagccccaggatgcgatgagccgacatcgaggtgccaaacctccccgtcgatgtggactcttgggggagataagcctgttatccccagggtagcttttatccgttgagcgatggcccttccatacggtaccaccggatcactaagcccgactttcgtccctgctcgacctgtctgtctcgcagtcaagctcccttgtgcctttacactctgcgaatgatttccaaccattctgagggaacctttgggcgcctccgttactttttaggaggcgaccgccccagtcaaactgcccacctgacactgtctcccaccacgattagtggtgcgggttagagtggtcatacagcgagggtagtatcccaccaacgcctccaccgaaactagcgttccggtttctatggctcctacctatcctgtacaagctgtacaaacactcaatatcaagctacagtaaagctccatggggtctttccgtcctgtcgcgggtagtccgcatcttcacggacaatataatttcaccgagtctctcgttgagacagtgcccagatcgttacgcctttcgtgcgggtcggaacttacccgacaaggaatttcgctaccttaggaccgttatagttacggccgccgtttactggggcttcaattctgagcttcgccgaagctaacccatccttttaaccttccagcaccgggcaggcgtcagcccctatacgtcatcttacgattttgcagagacctgtgtttttgataaacagtcgcctgggcctattcactgcggctgatcttgcgatcagcaccccttctcccgaagttacggggtcattttgccgagttccttaacgagagttcactcgctcaccttaggattctctcctcgactacctgtgtcggtttgcggtacgggtagttaagtactcactagaagcttttctcggcagtgtgacatcagacgcttcgctactaaatttcgctccccatcacagcttgtccttaaagtgaaaagcatttgactcttcacaagacttactgcttggacattctaatccaacagaatgcacatcttagcctcctgcgtccctccattgctcaaacgcacttaactagtacaggaatctcaacctgttatccatcgtctacgcctctcggcctcgacttaggtcccgactaaccctgggaggacgagccttccccaggaaaccttagtcattcggtggataggattctcacctatctttcgctactcataccggcattctcacttctaagcgctccacaagtcctcacgatcttgcttcaccgcccttagaacgctctcctatcacgcgacctaatggtcgcatccatggtttcggtagtatgcttagccccggtacattttcggcgcaggatcactcgactagtgagctattacgcactctttaaatggtggctgcttctgagccaacatcctagttgtctatgcaactccacatccttttccacttagcatacatttagggaccttaactgatggtctgggctgttcccctttcgacggtggatcttatcactcatcgtctgactcccggatatgaatcaatggcattcggagtttatctgaattcagtaacccaagacgggcccctagtccaaatagtgctctacctccatgatcctaattccgaggctagccctaaagctatttcggagagaaccagctatctccaagttcgtttggaatttcaccgctatccacacctcatcccagcaattttcaacttacacgggttcggtcctccagtgcgttttaccgcaccttcaacctggacatggataggtcacctggtttcgggtctataatctcgtactcaaaacgcccatttcagactcgctttcgctacggctccgactttttagtcttaaccttgcacgggatcataactcgccggttcattctacaaaaggcacgccatcacgcattaacgcgctctgacttattgtaggcacatggtttcaggaactatttcactcccctcccggggtgcttttcacctttccctcacggtactggttcactatcggtcactaggtagtatttagccttgggagatggtcctcccggattccgacggaatttcacgtgttccgccgtactcaggatcctgaactgagagaatttgatttaatctactgggctatcaccatctatggcggattttcccaaatccttcgactatcaagttctttggtaactcaaatgttcagtcctacaaccccaaagtgcaagcactttggtttgggctgttccccgttcgctcgccgctacttagggaatcgaaatttctttatattcctgctgctaatgagatgtttcagttcacagcgtttacctccaactagactatgaattcatctagtggtaacagttgattaaaactgctgggttgccccattcggaaatctccggatcatagcttacgtacagctccccgaagcatatcggtgttagtcccgtccttcatcggctcctagtgccaaggcattcaccatgcgcccttgttaacttaacctcatttacctaacggtaaatgcgattaatgagtttagcgataattaaacttcaataaaaaactcaaaaaacgcggtgttctcggtttcattatgaaaaaatatatttgatattatctagttttcaaagaacaagttttgagagttaaatctctcaaaactaaacaaagtttcgacgcgtgtgtaggtttccgtaatattccttagaaaggaggtgatccagccgcaggttctcctacggctaccttgttacgacttcaccctaatcatctgtcccaccttaggcggctggttcctaaaaggttaccccaccgactttgggtgttacaaactctcatggtgtgacgggcggtgtgtacaaggcccgggaacgtattcaccgcggcatgctgatccgcgattactagcgattccgacttcatgtaggcgagttgcagcctacaatccgaactgagaatggctttaagagattagcttactctcgcgagttcgcaactcgttgtaccatccattgtagcacgtgtgtagcccaggtcataaggggcatgatgatttgacgtcatccccaccttcctccggtttgtcaccggcagtctcaccagagtgcccaacttaatgctggcaactgataataagggttgcgctcgttgcgggacttaacccaacatctcacgacacgagctgacgacaaccatgcaccacctgtatccatgtccccgaagggaacgtctaatctcttagatttgcatagtatgtcaagacctggtaaggttcttcgcgtagcttcgaattaaaccacatgctccaccgcttgtgcgggcccccgtcaattcctttgagtttcagccttgcggccgtactccccaggcggaatgcttaatgcgttagctgcagcactgaagggcggaaaccctccaacacttagcattcatcgtttacggtatggactaccagggtatctaatcctgtttgctacccatactttcgagcctcagcgtcagttacagaccagacagccgccttcgccactggtgttcttccatatatctacgcatttcaccgctacacatggagttccactgtcctcttctgcactcaagtttcccagtttccgatgcacttcttcggttgagccgaaggctttcacatcagacttaaaaaaccgcctgcgctcgctttacgcccaataaatccggacaacgcttgccacctacgtattaccgcggctgctggcacgtagttagccgtggctttctggttaaataccgtcaatacctgaacagttactctcagatatgttcttctttaacaacagagttttacgagccgaaacccttcttcactcacgcggcgttgctccatcagactttcgtccattgtggaagatcccctactgctgcctcccgtaggagtttgggccgtgtctcagtcccaatgtggccgattaccctctcaggtcggctacgtatcattgccatggtgagccgttaccccaccatctagctaatacgccgcgggaccatccaaaagtgatagccgaagccatctttcaagctcggaccatgcggtccaagttgttatgcggtattagcatctgtttccaggtgttatcccccgcttctgggcaggtttcccacgtgttactcaccagttcgccactcactcaaatgtaaatcatgatgcaagcaccaatcaataccagagttcgttcgacttgcatgtattaggcacgccgccagcgttcgtcctgagccaggatcaaactctcaaattaatgatgagttctaaaaagctcatttaatgttgtactaaaatttatttgctagcgaattgacttcgcaaatgttttgctcttgattcaaaatcaaaagaccctacacatttgattcgtcgaaactttgttcagttttcaaagatctaattccgtgcgttaatcgcttaacacaactattacataatatcatttcatcatttccttgtcaacaactttatttaagaagttgaataactatgcaaatgaatttgaaacgttattatcataacataatcggtaacgcctcaatcagttgaattgttaacgcgacaagaaatatcttatcattagcgattactcatgtcaataacttttttgctgttttgaatatttattcacttacaacaatttgaaatgaaacaatgtaagtgctagcggctagctgtttaacagcagtgctcgcagcgacaagatatatattatcaagtattagtatgcaggtcaaccctttattcgaatttattttgataaattcgtaaacggcattgtttcactcacacgaacactcgtaaataactcgtgcaattcactggctagaacaaactcgagcccttgacgatcaaactttgcacgtacctgcccgtcaacagctaggtggtcaaagacaaagaccgcaactttttcatcatccagctcagccataatcgaatcatacaagcgcaattggtcaacatcaataccaatcgtatatcgcaaatcccacaatactgacgctaagggcgaatgccctgctcgtactggcaactgataaaaattgtatccattagtagaatgcttaactaaaaagtgcgacccttgctggtcattataaataattgtcccggcaacttttttctgcactaatactcacccgctttcaatcgatttagtgaatccgaagtccaactcgctaaatgattggcaattggttcaaagccagcatgaacatgccgattcgtccaaaaatgcttatgccgaaaagtcttgtagatttccaaatcattgaccgtcggatgcggttgatgctcgatacaacgtaatgataagctgatttttccagtatattcgtcaatatctaaaataataacatctacggcttgaccaacctttagatactccgtaatacttttaacgtatccttcatgacactctgaaatgtgaatcaatccctgatgctcaccatctaaggtgacaaaagcaccatatggttgaataccagtgactcgtccgtgtacccgcataccaattcgataattgctcacgatcataccatcctttctcattcattctatattgtcgataattctaatccccaatattataacctgaatacagcggattgcaaaatcgtaattgcaaaaaaagaaacccgcagccgcagatttctttcaaactaactaatcttcaattgtaattgtttcgatcacaacatccttcactggtttatcctgcataccagtctcagtggccgcaatcttatcaacgatatccatcccatcactaactgcaccaaaaacagtgtgccggaaatctagccagggcgtgccaccattgccatacgcagtcacgatttcttccggataaccagcttgcttcatctgatcactcatcccagcatctaattgtggcttttgaacgataaagaattggctaccgttcgtattaggaccagcgttggccattgataatgcccctcgcaagttgaaaacctcttgtgagaattcatcttcaaatggtttaccccacaaactttcgccacccatcccggtaccggttggatcaccaccctgaatcataaaatcaggaatgacccggtggaagataatgccatcgtagtaacccttctgagctaaaccaacaaagttttcaacactcttgggggcctgctttggaaatagttgaaccttaatatcaccaaagttagttttgattgttgcttttggtccatcgacctgacttaaatctaattgtggaaatgccacaaaatcacccgttttctattaagattatcttgataatacaagagaactcgattaaatgctagccatttgtaaggatttcttgcgattagcgactaagcatagtatttccactgattttctggtaacctagataggattaatttcacattacttggaggtaaccatgagttttttaatcgattttgtgttgcacattgaccagcacttagtcaccatcgtgaatagttttggaatctggacctacctaattctctttgccatcatcttcattgagactggcgcggtcattttaccatttcttcccggtgactcccttttatttgcagcttgcgcactcgccgctaatccaacctatggcttacatatctggacttttgtcattctcttcttggtggcagctttggcgggcgactcacttaacttctatattggtcattccctaggagaacgcctaactgaaacatcctggtttggtagactgatcaatcaaaaacagctggcaaagtccgaaaaattcttcgaaaaacatggtggcatcaccgtgaccatcgcacgcttcatgccaatcatccgaacttttgtcccatttgtagctgccagttcgcgaatgaagtatcaacaattcattcgctacaacgttatcggctgtgtcctgtgggtcattctctgttgtggtggtggctactacttcggtaatatcccgttcgttaaggaacacttttcgatggttgtcattggaatcatcctggtttcactgattccagctgtcttctctgctatccgcgcacgctttagccatccaactgaaaacgaagattaatccaattataaaaggccgatcagctaataatagctgaccggccttttataatctaacttaaaatgcagtgtccactgtaaatactcttcattaatccgcttcacgtaacgcttgtctgccgatactgagtaagtaaaaaaaagaccactcaatcaggataaacgctagaacaaagcactgaccgaagaacgtatccggcaagaccaaaatgattcggtccaatagtggatcgaacaaccagtccgaattgcgaaataagatcttatggaacatgataaagaactgatcaaaattgatagccattataacggtcactactggtggtacccagagggctgtctgcatcggtaatactaaccgccacaattgtcgatcacgtcgtagtcgctgccaaaaaaaatagaccacaacactcgtgacgataaacacaccgtaatcaagcataaatagattcttcacatccgcaaagtgaaccaacgcactcgtcgaatccgtaaaatcgttcatagttaatttgggtacccacggaaagttaagatatgctaacagctgatagtagttcgtcatcagccgtcccaatgtcaaattcacagttgcgcctaacttttgaccaaccgcattggcaaaatacaaccagctcgcgttgattgttacaattatcgtgccactcactaaccataagtataaactcagccactgagccgcatttttaaatttatttagccacaccatcgtctaggtcccattcgtccaaagaattgatctcattagttggtttgacggcctgttgtgccactagttcaggggtagagacaccggtatacaccaataaggagtcaatcccaaagttaattgccgctgagatatccgtcatataattgtcaccaaccatcacacaatcgtgcttatcgagaccaatccggtcgaccgctttctgcataataattgtctccggcttaccaatgtaagttgcacgttgttgggtggcccgttcgaccatcgcaattactgaaccagcacctggcactagcccccgctcatttggaagattagtatccgcgttggtgccaatgaacttagccccccgcttaattgccagcgtagcaagttcaaatttatggtaggtcgcatcatagtctaaaccaacgattacgaatctaggtgtgcgctcatcgaacttgaagcccttttccaacattgcacccttcaagccaagttccccgatgacgtacatcgttttatcaccatcacctgcaaggtcattaacatagtctgcagtcgctaacgctgccgtataaacattcgcaggactcacatgaatatcgtgattgttcgctaagtttgcagccacatcttctggtgatttagtcgtgttattcgtgaccaataaaaaatcagtctgactagcctgtagtcgttcaataaaccgtttagcagcaggaatacgttcccgaccacgataaactgttccatctaaatcaattaaataacccttgtacttacccaatcaaaatacctctctctgttcctacttttgtcgaatcgtaaagtggcgtttaccactactctgcttcgttgtttgcgcttgcttaccattaccggccgtaactttcgccggttgccgccgcttttcagtaaacggtgcggccttctgcttagtggtgaagctatgagacttccgccgttgtttgctgcgactactgttacggttactccgcgctcgggattgccgactattagtgtttttctttccccgccgatcatccttacgtgagcgactggtacgcttaggtttaatgacccgttcgtttttaatgataaaataggcgcaaccaaaattacaatattcgtacagatagtcttggaccgccccaatcgtctgtgagcgctggacatctttcatatcatcacggaaaaaaccttttaaccgtaactgttcaaagccccaatcaccgacaatataatcatatttatttaaaattgagctgtagcgctcaacgaacttgtcgaggtcaaacccttggcgataatcgtacacgatttcaaacgggtgcttgctaacttcaaagtgggtcttatcagttcgtaatccatgatacaaattgcgccgccgttccgcttgttgttcagctagttcatcaatatgttcgcgattcacattgacaccacctttctcttatttaaccggccatcgacgcattaagtaatcgccaacaaccgttcttaacatggcttcaaataatatctcagttcgaccactgatattaatggtcgggaaaaacggaatgaataaatcatgatctaataacgcaatctggtacgtttgttgccgattgaccggctgaccattcactagtaatgtatgctgtcccgttttccacgtgaggccctggtactggatataaccaaagacttgaccacgaaatcccattcctttaatcggaaatttgttcaaaaacgggcgaactaactccatctcatagactaagcgccacaatgcttcaccacttaacgtcactcgaataacatgcatcgcgtgaggtagcatggtatgtaaatcatttcggttgaccatgcctgcgggaagatcccgcatgaacaggccaccgttcaacatacctagatcagttttggcatagtccgtaatggccgctagcccgagggccgtcaaatcacttgcatggtgccaatgtggccgcagctgcgtcggcaccttcgcaacaacttgccgcgtgagtaacgtttcaccctgttgctcccagccagtaatcaacgtttcatcaccggccacaattggtaagctggccgtggcaacggtatgcgccgcggccgctttaacgtgatgttgatgatcaatcgtcagttcaattcgcccaatatactcaccgtattttccagctgccgctatcaggaccccatttttcagttcaccgttcaccagtaaatgatgcgtatgactgccaataacaacatcgatcaccggaaactgttttgctaaccaccgatcgacattgataccaaggtgggacatcacgattaagacatcatattgccctgcatattgtcgtaacaactctgggaatcgcgtcttaacactggccggcgtccaaccgttcaacgggtaagtcaacgtaaacggtgccgtaaatgccagcaacaagactcgtgtcccccgtgcagttgtaatgattttagctggtaatgcccactgcggcggtcgttgcgttgcagtatctgtcaaattaccgagaacaacatcaaagttggcgcggtcatacaaccggtttaaggccgcgtgcgttaaacccagtccttcattattgccaatcgtaaccgcatcatagccaatcgcgttcaataacgccacgttggcctgcccttgagtggcttctgagagtggatgggcacgatcaaccgcgtcgccgaggtcaaccgtgatcacatggcttccagattgccggcgctgctcacgttcggttaataaataccgttgaatacgtggccagttttcaaaatgcgaatgaatatcattggtatgcagaatcgtgacttgctcgtccacggtcaatcgcccctcaatcgttgtctttgttaatcctaaagcattcaccaaagtcggtcaagcactcgcttactggcgcttggcaaaatcaatggctttaccgtcaaccatctgctcgatctcggccagtgaaaatggcgttccaaagggcaccggatggtccaagtaatcgacttctggtgtatcgacacccacgttgatgttctccttgacgttgacggcataatgatgaatatgcccgtgcaaattgataatttgtttgacgatccccatcatcattgggtagtgcgtcatatagtattggcggtggtcgtacttaatcagtacccccacgtcgtgaaattcaaacttcggttgaccattcaactgtggatcatgagcagccaaatacttaaagaaggcccgtgaatcatggtttccctttataaaaatgattttgccatttaactgtgctaagagtgcaaaaacccgctcataagacaatttcgctggtcgcgtaaaatacagcgcaacatcgcctaaatgatagactgtatcctgatccgtcacacgggcattccaatggtcaacaatcgcttggttcattgtctctacatctggaaatagccggggcgcaaagtcgttgtcccccaacaaatcagcatgataaaaatgtgtgtcggacgtaaaatattgcatcgttcaaacctcttattcgtatatttacatttgtaacatcaatcggatgtgtcatgtctagcgaatttcatgacttttgcttgaaaagctgacttatccgttcgtcagcatgtacccatgtcagtcattcgaatcctattacgactgtcagtcatcatatggcacactaactcggcaagtttatactaaacaaaccgtttccaccgagtcaaagctgacagttttggcacttactgaacagcacgtattaatcatgaaccattttaaagaacacctgacacaacgcgttagtcatttatcattgtaccgcgcaccgttctaaaagacactagaacagttttaagtttattgctttgtcagcactggaaccatgttttatgaccaacccatattcacaaatctagctaatatcgtcaaaaagtgcacttaactgcaatcggcagagttaagtgcacttcataaatcccattagttaacctacttgatagccaatcagcactcctggttattgctgactagtcgtgtgtccgttgacgaattcggtcactaacgatcttgacaatgtataagccaaccacccagaccgctgacacgagtaacgcgattaacgtttcaaacttcagacagagaacaacagcgataaaagctaagaacactagaatgaagtaatcagataacggaaacagtggcatccggaatttcactttagcctgactgcccgcttgacgtcgatacttgatatgtgcgacgacgattgcgccccaaataaagataaaacaagtagtcgatacactcgcaatcagcgagaagactttcccaggcatcagtaagtttagaattactgacaacccaatcaccagagtcgagaaccataacgcattgcggggaacttggcgggtcgatagtgtccccattcgtttggcaaacttgcttttgccatcatacgttagtgagaataacatccgcccggtactgaataacgcactattacaactagaagcggccgccgtgagcactacgaagttgataatcgcagccgctgaacgaattcccaaattggtgaatacttgtacgaacgggctgtgtgccgctgaaaagtattgccacgggtacatacacattagaaagaatagtgacccaacataaaacagaatgatccgcacgggaatatcattgattgctttgggaatcaccgtcttcggatcagccgtctcagaagctgtcatgccgaccatctcgatcccaataaaactgaacaggaccatctggaaggaaagcactaagcctttgattccgtgtggcataaaaccgccataactaaccaaattggttaagctggcgtggcccacaggggtcttaacgctaaacaagaccatgccaatcccaacagcaattaatgccaagatagcagcgatcttaataatcgcaaaccaaaattcagtttcaccgaacgctgagacattaatagaattcaagcccagcaataaaatcaagataatcagccccggaagccattgcggtaacctaggccaccaaaactgcatatactcaccagcagccgtaatttcggccatcgcaatcgtgatccagcaaacccaatacgtccatccagccacaaagccggtcttatcacctaagtattgcttaataaaatcaatataagaatgcgtatgaaggtcagataacagtagttcacctaacgcccgcattaataaaaagcacactaaaccggtcactaagtatgcgatcaggatcgctggccccgccaagtggatagattgaccggcccctaagaacagtccggtcccaatcgtgccgccgatggcaattaattgaacatggcggctttttaagcctcgcgagagttgttccgtcgcaggctgtgaattttctttcgtcattatctttgcactccccttgaaattattatagcggccaaattcctagcattcaaaaggccacgcttaagaaaatcacatgattggactataccattgcttgctagcgaaattcatcttatgtacgcgtaagcgtttgctaacttgcatggctgggattcagctttgttagttgactaaaccagtgaacgctcccgctacgtgaataaagtgaaggcaacgcatactaacatgaataactttcacttcagcatctaaaaaagcacccggattttcatccgcgtgcctctttacaaccttaatcatattgaaacgatgctgatcactgattctgagccacgcgctcaacatcgcgggcaatcataagttcttcatcagtaggaatgagtaacgtccgaatcttcgcatcggtcgtactcaggtcccgttcgacaccactgacttgattcttagtcgggtcaatcgcgacgccaaagtaggtcaaccgatccgcgattcgttgtcgcatccgtgcatcccgttcaccgataccagccgttatcactaatgcatccgcaccttgtagctcagccaaataagcaccgacatacttaacgatccgattgacaaaaatatcaatagctaactgagcctgtgagtcctcatcataacgtgcctcgagctcctgcatatctgcagaaccagctagccccagtaagcctgactgcgtattcaaaatcgttaatatttcatcaggatcgctaatattaagctttttcatgagataagcaaccagcgacggatccacatcgcccgagcgcgttgccattgtaataccagctaacggcgtaaatcccatcgaggtatctagtgactgtccatgatcaatcgccgtaatcgaacttcccgcacctaaatgcaacgtaatcagcttcaacgtttcgagcggtcggcccaataatttagctgctcgcaccgcgacgtagcgatggctcgttccatgagcgccaaacttgcgagcaccatatcgttgatagtaatcatacggtaacgagtatagatagttaaccgccggcatacttgcatgaaacgccgtatcaaagacagcgaccgcgggcacatgtggtagtacccgcttgaaagcacgaataccgaccgcattagccggattatgcaatggcgcatattcggccagatccgtaatctgcttaagcacttggtcagtgattaaaactgaatcatggaattgctcgccaccagcaacgacccggtgaccgaccccagtaatttcatcatatgagtcaataattcgcaatttaattaactcatccaaaacgatattcacggcagccaaatggtccgcgactacggctttctcttggtaatgatgatcaacgccatagcgaatattgaccggtgaagttttgaatccaattcgttcaacagcgccctgtgcaatcacccgttcctgtggcatttcaaataacttaaatttcaacgtcgaactaccagcgttgatggcaatggtcttccccaaacgacacactcctagcgaataatattctggtcgacccacgcatcaatttgagcggtaaacgcttgaaaggcacgttgatcctcaaatgatggaaagtcgcctagtaatactttacctgcttggtgggctcgttgtccatgtttctgtaaaacaacaattgattttcgtgatttttcatcaagaaaaaggttagtcggcaagttcaacagaccttggaggtaagccgcagtgctcatccattttaacagtccttgagactcttgcgactgaaaaatcgtcgttggaacaaggaaaacaccccagccgcccggtaacaaatgagccatcgcttgctccatcatcaaatgatgaatgtaagaatgaccattcgtcgctttcgtttgaaaaccttggacacggtcatccaatgggtagtaccccactggcaaatcaccaattacaacggtcgttttcggcatgaccagggaatcaattgcgtcttgatgaaacaactccactgctgatcgttggagatccatgctcatcgcggcgattgccaactgattatcatcattatcgactccgtaaccctgaatcggacgtggccggtccgtctgcaactgatttatgaccgtagttaataagttaccagtcccgacagcaatatccaaaattgacaaatcagtcgtcgatccaactaacttagcaatcaagtatgccgttaacagtccaatcgaatctggtgtcatttgatggtttggatcaacgtgatcattatgaatcgcctttagtaaggccaactgaagcgcacgccgaattgtttcggcgtccaattgttttaagtcgatcgtttgatagagctttgttaaagctgccgtctgttccggatttggcttgccatcctcaacatgtacagattggcttaataaattatcgccagtctcaatgagcgcatccacgtaagaaacggatagttgttgcatcaaaacttgaactgattgatctaagacctgaaaaagcgtctcggtttctgcttgtgccagaatactcaccctcccgcaaaatctgtaatccttaaccatattactgattttacgcgttaagttcaagtcacggggttcactcaccaatcaagggagcgaattatgctgataagggtgctcataggattgtaaaattaagcgatataacgtctggcgagactgaaaattaacgtatcgttgggtttcaaacgccccaccaattaacaataagctaatcaccgaaagcaggatcgttccgcgtcgcttcctcatctaccattgtcctccgatctggtaacagtaattgggcttgaaaatgaatccccttatcagtcgtcatcgtcagggtcaaatcatcggccacgtgaaattgccgaacgccctgcatcagattgatttcaccaccaccatagtggcgcaatccgattcgatgtaggatatgataataagtcaataaatactgtttgccggtgaccgtattaaccaaatgaacggcttttcccggcgtcagaccaccctcatcggaaatatggtccaccacaaaatggtgatctggattttcaagctcgtgaagcatcaaataccaatccactgttggcaaatccacttgggtgcgccgggccaaattgcgctgcccctgaaaaagtgtcgtcagcactacggccacgattgctaacgacacaacggcttcaattaacgtaaaaccgcgccgcctaatcatgtgcttgctccggtatcctggataatagctgctgacgttgccggtcttcatattgttttctggccgtctgaatcgcctgcaaggtctggcgttcatgtgactgcatcataatctctaaactttcaaacccaatcaaaccacccatcaatagccccagagcggtaatcgtttcaatcatcaaaaaacccattcgcgtctttaacatgtgtgactttataggccccccaccccatcaaagcattcagtttgattttctgcttcggctgtaattgcgacttgaaaataaccactgctagctgtggatgcccatttttctggatttgaatatcacgactgcgctctgtttttaatgttgcaggcagtgggagatgccactgtgggccactgataggccgcccccgcttgccaccccaagtcacgacttctgtgccacgaaagctcacgacctggggctgacccgtcacactagcggttaaggtctgttgctgccacatcgtttgtaactcccgccagaaagcctgttccgcattctgttggcgttgccgtgtgggaaaacggtgcacagcaatcaccgccacactagccacgatcgccaagaccgctaccgtttcgattaaggtaaatccctgtcgcttaaccaccaactactttttgtggttgcggccgtaccggactaatgccctgtgacttagcctgcttatattgaccatcgttaatatatcccttgttccgaagttcttctaacattgcgtcgtcatccgtgacggtcttacccgtatcattcgcatacatttcagcctgattttgaacaacttcagtcagggcttcttgttggcgaccagccgcctgtttacgttgttgattcaaattgggcaccacgatcaacatcaagagactgatgatcgccaatacgatcaccatttcaattaaggtaaaaccgcgctgtggtgctgccgtttttttcatcaagcgtttcattaataatgtcattttaaaatctcccccattgattgatacatcggtaataacaaactcaagtatgtgccgacaacgacgagtgcaataatgccaaacatgatgggttgaatccaaccaatcatccggttcaactgtcgaatcaagcgttcgtactgcaaagttgcaaagtatagtaattcctgacttaactgttctgccggactctctttgccgaccagtagtgctaactcatcaggtaataatcggtcctcctggataattgtgactaacgaagtcccagtcagtaacgcctgttcgataacctgcccttgctgataaatcagcgccttagtttgaaagtgctgactgacttcacaaatgccacgaatccctaaaccaccagtcagcagcatacccgcattaaggcttaaatagtaaccacagtagtttctgatcaggggaccaatcaaggggacttgagccaaccactgatagcgccgccgaatgggtaatcggctaacttgaaggccaaccagcaataagcaaatcaccaaggtaatgaccgtgataccgctaaaccattgccaattcgcgattgtcccactaccattaccaccatgagcaagactcggtaaaatcgcagctttgaccgtgcctaaagttcccagcagtagaattaacagcagacaagggtactgtaacaaccgccgaatttggcgtccctgttcagcacgcgctcgcattaattgacctgcctgcatcaaggtccggcgtaattcaccatgagtctcagcaattaagaactggtaatacaagtccaccgcaatgtatggacgcagcgccatagacaaatcatcacccgcggctaaacgccccagcgcgggctgcaaggattgaaaggccggtccttctacatccaatgtaaattgaaaggcttgctgaaacgagaagccgttgcctagcaagtcggctagcgtttcaaacagcttcgcctgcatagcaatcggaagccgtttacgcttccttaagttgattggccgtcgcatgatcgagacggcccgctgccaattgttcatcaattaactccgcccacctttcagtcatcatttgcgacgttttgggcattgcatgcggtaacacgaccgtatcgaaaatcgtcgccacgctgccattcgtcactggtacgaggcgctgataggacattgcagttaaagcctgctccaaaacagcggcttccactcccaattgcgtcaaccggggaataatcccgtagacaccgcgcgcatgaatagtacttaaaactaagtgaccacttagcgctgcctgtaccgcaatccgagccgtttcggcatcacgaatctcaccaataataaagacgtcgggatggtggcgtaacccaaccttcagtaaatcgccatacgccatctgggccggtgcgtttacttgtagttgtaaaaattgtggttcataaatttcaaccggatcttcgatcgtcatgactagccgttggccacgaagctgccgcacaagatcatacatcgtggaagttttgccagaacccatcggcccggaaaataagatcaatcccgttcgtcgcattaattgactcaattgttgccgttgctgtgggaccaaatagctcaattttcgggccggaccttcatacaataaccggacaaccaacgactcacggtccaaaaagtcgccaactgccgagattcgcaaatttaaagtttgctctgccaatgttaacgtcatcgcccctaattggggccgccgatgatcactaatcgccatgttactacggtatttgatgtgattcatcaattgctgggccaactcagttgtaatctgagtaagtgcccgcaaactgcctgctgcttgcactaacacctgatacccttctgccgtgggtaaccaataaatatcactggcccgctgattcacggctgcctgaatgatttcgttcaactctgcttcaatcaccatttatcatggtcacgctcctttcaatcattagtttcgtaacaacgaccactttccacgaaaaaaatgacatttattttggcatcaaaaaagctgttccagaaataacaaattatttccagaacagctcgtcatcgcatattttcatttgcaatcctaacatacggcgttataagcgccccgatataaaccaattaaggcgttaggcccgctcagccgcttcaatggcttccttagttggaatcgatggttgcgcacccaatttttgaacagctatcgaagatgcccggttggcaaaccgtaccgcagcggccaaattactaaagtctggcattaagaccgaactgagtgcaccaataaaggtgtccccagctgcagtcgtgtcaacggcctcaaccttataagctgggacgaagccgtgctcagcaccgcgcatccagaaagcgcctttactcccaacggtaatgatcacgttagcaacgcccagcgcctgcaacttctgtgcgccctgaatcatcgattgctcatcagtaatgtgcacgccagtcaaggtttccgtctcagtttcgttaggaacaattaagtcggtcgtcgctagtaattctgcgggcaccgtcgtcgtagctggtgccgggtttaaaatcgttttttgcccagcggcctgagccaattcaaaccctcgaatcgttgctgcaatcggcgtttcaaactgtgcaatcaaaaaagtactagcgctaattgcgggttgggcccgttcgacatcttcggccgtaacctgctgattagttccaccatcgattaagatacggttctcactactactatctaacaagatgaaagctgagccggtactagccacattgctatgttgaacatattggtcattaacaccactattcgtcaactgctgcaccataaaggccccttcctgatcagtaccaactttaccgataaaagtcgtttgggcaccagcgcgcgcggctgcgatggcttggttagcccctttacccccaccagcgacactcttaccagtcagcggtagcgtttcaccaggcttaggaaaacgcttgaaacgcaaaatcgaatcaacattcaaactacctagtacggttactttattcatgattattcgtcccttcagtattcaactgctctaattttagcaaactggcctgttcgacgcacttgttttactaatattttaagcaataaaaaacgtggttcttgatttatcatcaaagaaccacgtcttttcatcattaatctgggtagttagcagcttcgtatacttctgatacgtcgtcgttatcttccaattcatcaatcatgtgttgtaacttttccactttatcagcaggaacgtccgttaggttttcaggaatcatggttaattcagctgtttccaacttgtaaccattagcttcgagggcatcacgaacggcagctaattgtttaggatcagtgtaaatttcaaacgcttcgtcgcttgattgtaaatcgtcgccaccagcatctaaaacgtccatcaacatcgtatcttcgtcggtatctaaatcttcgcgactgatcacgatgtaacccttacgatcaaacatgtaactaaccgcaccagttgcggctaaagccccaccatgatgcgtgaacgctgaacgaaccgccgcagcagtccggtttttgttatcagttaatgcgtgaaccagaacggcgataccaccagggccgtagccttcgtaagtaacttcttcgtagttctccgcaccggagccactacctttatcaaccgcccgtttaatattgtctttaggcatgttggcagctttggccttatccataactaaccgcaattgcgcgttagaatctggatcaggacccccggcttttacagccatataaagttcacgggaaatcttttgaaagactttcccacgtttagcatcttgggcgttcttacgtccttgaatgttatgccattttgaatgtcctgacatgtgtgactccttctttcatatttattttcagtttagtagataaacatacgtaaagtatgatagcaaaaaaagcgagcgatttcaagcactagaaccaagggcatccaagttctgcgatttttattgcaaatctaatgaaccagtttcgttattggactctctttcaaatttgaaatttcagtttgctaatgacaaccacaaccacgacaaactggtgttatggccgtaaatatgcgtaacccacagcttgcaagtccacgattcgcaccacaccagcgggaacgaccgtcacactggcaggaagttgggccgcagtcatttgatgactcaccatggcattatggcaagcatcaatctcaacttgcggtaacgtctgttgtaatggcttccaggcaccagttaccagcgtcgtgatagcgggcccgttgaccacaaccaccaccgtactagttggccgggctgccaaaaaattctgcacattgcttatggccgttgcgaccttagccggctcgtcgacatggactactaagttagtcattcgcttgtcctccctcgatcgaccgcagttcgagtgcgcgtagatagtgatagctactcaacatgttagcgcaggtcgcatccgtttcatccggcacttcataaatcatggtagcgtgcgggttgaggattggtaacacccgctgccagtcaatcagtccctgccctaaaggtaaactatcgtgccgcgtccccatcgaatcaaccaaatgataatgttgaatgagtggagccagccgcttcaaagccaacatggtcaattccatatcaccgtgcagcgcaatgaagacgtggctcaaatcacaaaccagcggataatgatgctgaatgatacgctcatctaactggggatcaccatacataaaacttgccgttaccccattttcaatcacgacatgtccactcgcctgacgaaccaaattatccaaccgctcaaagaccacgtcacgtgcaacctgcaaggactcatactcatcgatcaagcgcccactgtcgctaccatagccaccgtgtacgagcaccttgacatccaattccgtcgccaacgcaagtaactgggccgtactcgtttgtaggaattggtacgccgcagcttcacgatgtggatcaagcaattgatcaagatgaacgccttgataactcatagggtgatgaatcacaatttgctcggtgacagttgtctttacaaattggacagctgttttaagtgtctgaaatgcttccggttcaaagtccgtggcactcgtaaaaaattcaaatacttcgggccggtattgcaaacgatccattaattgtgcgggtgcttgggacgccttcaagcctaacttaatttttccgggccgtggccgcattattagttgtgtcatccgtttaactcatcctttcacgcattccaaaaccaaaaaaggcttggaataaatattccaaacctagtataacgctatcgttctaaattatgccaacgtcactagctggcagacaaccgaacttaatcagcagacttggttgagccccgccgaacaatgccgtatggcaaggtgaccgtcttctcgtcaagttctttatcgttcatcaacttagttaacatccgcatggcaaccgcaccaatatcatataatggttgggtaatcgaggtaatggctggacgcgtgatttgggtaataatcgtatcattactcgtcacaacttccaagtcatctggaacgttgatcccggattccatacttgcgttgataagaccagccgccatttcgtcgtccccaacgaataccgcagtagcgccactatccgcaatgactggttgtaacttccgcccagcatcatatgagtagcccgcttcataaacgagggcgtcgtcaaacggaatcttagccttggttaaggcccgtttgtaacccgtcagtcggtattcagcgttgattgattgtgacaatgagcctaaagccaacgcgatcttcttgtgaccacgtgcaattaagttagtgaccacttcttcaacagctgcagcgtagtcgatattaacgcttggcgtttcattgttcggatcaaccgtcccagctaaaacaactggtgccttggcccgtttgaattcagcccggagcttgtcatcaatatggttacccataaagatgaccccgtcaacttgcttagccatcaacgtattcaacacgttgacttcttgttcacccgcatcatcggagttcgttaaaatgatattgtacttgtacatcatcgcaatatcatcaatcccgcgtgctaacgccgcaaaataaatgttggtcacgtccgggatgattaccccgaccgtagttgaacgcttacttgctaaccctcgtgcaactgcgttaggccggtaatctaaccgttcgatgacagctagtacctttttacgcgttgcgggtttaacgttgggattaccattgacgactcgtgaaactgtggccattgaaaccgccgcttcgcgtgccacatcataaattgttactgtttgtttttccatataaaaatagccctttcttgcttggtatcatatgttttcatccgttttcatgcaacatcaaccaatatagcaaaattacgcttccaatgcaacttaagattgttattgaaatcgctttcatgaaaataataccgtacttgttttcaaaatgcaagatttaccacacgaagattgttattttgggctcattattctcagctttttatcatcaacagcgctatactagtattattatctattattttatctaaggagtgtttgaattgacagattatacgaaactgcaacaagtccgtcaatggacccaagacaatcacgttgacgtgacctacatcagtaactttcacacaatttcatatttgactggttttgagagcaacccctacgaacggacgctagcactgtttgttttcgcggatgcggaaccatttctctttgcacccgctctcgaagttgaagcaatcaaggagatgggctggccttacaaagttttcggctacctcgaccatgaagatccatacgcgctaattgctgatcacattcacgcacaattgactgatcctaaagtttgggcccttgaaactgggaacttgacgttagaccgctttaccgcgctcaaacagcaatttccagctgcccacttcgataaggatctatcaccttatattcagcaattacggctggtcaaaacagctgatgaacttgaaaaactaaacattgccggtaaatgggccgactttgcttttgaacaaggatttgctgctgtcaaggcgggtcgcaccgaacaacagattgctgccgaattacagtatgccttaatgaaaaagggaattatggaaatgagtttcgacactttagtccaagctggtgaacatgccgccaacccccatggtgcaactaacgaaacccaagtcaagccaaatgaattagtgctattcgacctcggcgtcatgtatgaaggctatgcttctgatgcttcccggacaattgcttatggccaaccgagtgccaagcaaaaggaaatctttgacgtctgtctggaagccaacttgactgctcaggcagccattaaaccaggcatggcagccgaagatgtcgataaaatcgcacgcgatatcatcaccaaagcgggctatggcgaatacttcattcaccggttaggtcacggaatcggccaaactgaccacgaatttccttcgattatggctggtaaccacatgccactcgttgaaggcatgtgcttctcagtagaacctgggatctacattcccggcgtagctggtgttcgaatcgaagactgtggggtcgttactaaggaaggctttaagccatttacccatacgccaaaagaattaaaagtattagatctttaattaaaaacgtcaaagaagcccgtcacgacataatccgtgacggccctctttttttacctagcgttgactggtacttgcttttagtgttattccggtagcggatgttcggtttcataatcagccacttcggctaacagcgccgccgtcgttttcagtggcagcacgtcacagtcaaccgcggcttcactccccgcctgactcgcacgccgataaacatcaatcttatgattgactttttgcaaattcaacaaggattgatggatttgcgcttcaacagcctggcgttgctcttcaaacattgctagccgttgatcaatcgttccatccccatcggcacaccaactaataaattgtcgaatatcctctaacggcatcccggtctgcttaagacaacgaatcaatgccagtgaatccaagtcttcatcattgaagacccggcggccctgcttatcacgcttcacaaagggcgttaagcccgccttatcataatagcgcagtgtataacttgaaataccggtctttttggcgaccgctccgattgaatacaatgtgattcctcctcaaaagcagataggacaccgagcacttgctcagtgtcctatcttatcgctgtcagcttacttggctggtgacgattcatccgttgtcgattcatcatcagacttcgcaggtgttgcgtccttagcaggtgctgattctggtacgggcgctgaagtcttctcgtcctcgccagctttttgataagcagctccaccatcaatgacgatatcttcatcatcaccttcatcatcttcgaccttagctaattcagaccgtaaactatccgtagcttggtcaagacttgagccaaagctttcacccgtttcctgcttagcggcttgatactggtcagcaaaatcggccacttttcgctttgtatcttcaaattgttgcccagcttcagccttgaagtcttcagcagcatcgttggcatagaacgcatagtcgattgcccgatccttaaaatcggcaattccttgctgtgctttagctttcaattcagcctttttatcatcatccatcttcataacggcggtagcaatcgctgcaccacctaaaacaacacctaataagaatccctttttcgacataattaagactcctcactattattttttgaacgtcgattacgatagacatcaaaagcggctttgccgaccttgcttgcgctggagaacttgctccgcttctcattgttcttgccaatcttggctgttaagtctcgagtcgcagcatttaagtcagagacgctctgacctaagtcgcccatcgcttgaaacgctggatcaattgttgcaactttgccgttaacatcctttaagagttcattggcatttgccatgattttttcagtctcatgtgacaaggcgtcaacatcatccgtaatattatttaaactacggttgacttcccccatcgttttagtaatccgcattaaaaaaatcccgataaagcatactaataataagaacgcaatggcggcaatgatgcccgcaatgtgtgtaatcatcctaaaattcctccttcaacagccatgatattaaaactagcatagcattgtctttagtataccgcaattaaaaaagtgcttacaacattcacccagtcacatttggtcgcaataacttgatcacggcttggttgcccgcgtcaaatctgataaactagtgaacagacaacaataacgagggtgaagatatgtttaattcaattaacctagcagcggttgacacaccgactaaacaagtttcggtgtggatgaagttggctaagaaaattgactggcaacaaattattattaatattggcggcaagctactcgaaatcattttatttattttactattttgggtgattgatcggctaggaaaacgcctgatccaccacttatttttaacgaatgctaataccagtgatactgccaataatcggatttcaacgatttttacattatcattaaatatctaccattacgtcatcatgttttttggcatctatgcggtactttcagtgttaggtgttcccgtggggacgttgattgctagtgctgggattttcagtgtggcgttaggtttaggcgcccaaggcttcgtcagtgacattgtcaccgggttcttcattctacttgaagatcagattgatgttggggattacgtcaaaatcgaaaccattgaggggaccgtctccgcaatcggtttacggacaactcaagttacgagtcccgatggcacgttgaactttattcccaatcgcaagattttaatcattagcaaccagtcgcgtaacgatatgcgcgtgctgattgacctctacattctcacaacgactcccgttcaagatctgactaacgtggtccgcgaaactaatgccgacctcgtgcctcagtatcctgatatcatcggtgagcccgacattcaaggcgtcacgacacaagccgatgggacgttggtcttccgagtacaattttacgtcaaaaatggcatgcagttcgcaattcagcgcgactttttggccgcctacttgaacgcggcccgagcagcgggaattcaactcccctcgccacgtttaaatatcgccccaacgcacaagtaagctcaaccaacacaagcccgcacagcggttgctcagaaatgagcgccacggtgcgggcttgatctttcatctgacaaatttcttcaggtgggaaccatgacgcacgttgttattgtcaggaatagttttagttattcccattcgcaacctaacgtgaccaggcgaaaactattgtgcggtcacaaccaaccattaattgcagcaacgctctgcattcttgaaactcaaaaacgtactgacacgtgttagcgcagtacgttttgtaatttatttgtgtaacgcattccgatgagtcaaaaagccggtcatcgcattgaccccactcataatggcagccgtgtgcggcaccatgttttccgagtgcaacgaatatggactgtcgacccctaaccagaacattgtccctggaatctgatgaatcaaataaccaaagtcttccccagtcattgctggttccgtttcaataaagttgacatcatcatcatcctgcatgtacttgataaaatcagcagtgattgcgtcattgttctcaacgggataataaccaccttgattgagcttcaaatcgatattgcagtcataggcgagcgcaatcccctcagtaatcgtccgaacccgccgctgaatatgcatgttcatctcctgcgtcaacgctcggatcgtcccgtcaatctgggcctcaccggcaatcacattgccaatcgtgccagcagtaaagtgacctaatgtcaccacaccactttgaatcgggtccacgttgcgcgctacaatcgtctgcagctgggagactaacgccgcaccagcgacgaccatgtcgtttgcttgatgtgggtaagccgcgtgtccacttttaccacttaagtgtgcgtggatctcacaagtccccgcaaataacgtgcccatccggcaaccgatcgctccagttggtaaattaggattgtcatggaatgcaaaaatctcatctggcatccaatcaccatctagcgcaccactttcgtacaagcgttgcccacccgaggcattttcctcagccggctggaacatgaaaaccatgtcggtcgcaggtcggttctctgcaaagtagcttaggattcctagcgcgactgacatatgaatatcatggccacacgcgtgcatgacacctggatgggtcgatgcaaatggtaagcccgtattttcagtaactggtaacgcatcgatgtcagttcgataaccgattcgataatcatgctttaaaccactgactttcactaaaatcgccgtatccaaagtaggaatggttttgattgtcagccactcttgaggcatcttaccaataatcgacaataaataagcctgtgtttcatgttcttgtaagccgatttccggaatttggtgtaagtgttgataaattggaattagatcggtttcccgtaagaccattgtttatccctccaccattaaagattccgtaattctgccattaattcagtcttgctcttagtcttatcatcaatatctttcaacttacgagcaggaaccccaccgactacggtgttaggagcgacgtcttcaatgacgatcgcacccgcagccacaacggcacccttaccaacatgcacgccttcaagtacggccgcattggcaccgatcagcacgtcgtcatcgatttgaactggtttagccgaaggtggctctaccacgccagctaacacagtaccagcgccaatatgacagttcttaccaacaattgcgcgaccaccaagaatggcacccatgtcaatcatcgagccttcaccgatttcggcaccaatgttgatcaccgcacccatcatgataacggcattatcaccaatcaatacttggtcacgaataatcgcaccgggttcgatccgcgcattgtattgcttcaaatctgccattggtacggctgaattgcgcgcgtcattttctaattcataatcttcgatatttgcagcgttagcctttaagaacggttcaacatccgcccagtcaccaaataataccccagcgttgccactgaagaaagttttgatgcctgctggaacgtttaattggtctaaagcacccttcacgtatacttttacgggtgttttctttttcgcactgccaatgtagttaataattgattgtgcatctaattttgccatcggagaccctccaaaaatttatttagctttttcactagtggaaaaatccttctcaatcatatcatattgtttgccgatttcatgggtcagaaagttaaaactcttcatgaattcacgacgagtgacaattccttgaaaaatttgctgttcatcaacgactggaacaaacggattatcaatcatcaagtgtaacgtctcttcaacgtcatccacatcatgaaccgtcttaacttgtgtctccattacgtcacagacacgtttttgcagtaatatttcagtattcagttgatcaaaacctaacatttgttcagtaatcagtggcaacgatactaaaccttcaaagtgaccaccatgatcaagtactggaattttggaatacttgaccttcgttagtactaaaaacgcgtgatacaaattattatcagtttgaacgttggcaaccacgtccgccggaatcaaataatggtcggcgttacgtgacaataagtcctcaactggttgaattaacatacagcgcctccttcactaagcccatccctttattttaaccgcaaaagcactttgcacagccctaaaaatcagtttttttaccacattttaatcagcaaaatgaaattttagttctggcaccgcttgtagttgccgatcataatattggacgtcgatacctgcggctgacgttgtcacgatggcgtaggtgccaccgatacgtgcaaattcaccacgcggataagtaatactaccaggattaagcacgaccacgccgcctcgtcgttcaacacccagttgatgcgtgtgaccaaagaaagccagcgtcgcattgtgcacctcagcattagctaatagatggtccaatcccatgttcacaccgactaagtgaccgtgcgtcatgtagactgtcacctcatcaatagttggattcacttcatttggaatcacgtcatcgaaatccatatttccttgaaccgtgaatatctcttgaaaaaccgcgtcatcatgcggtaattcagaatcaccacagtgaaaaaaggcgtcaacctgaccgcggtacttatcaagcaatcgaactaacacgtcacgatcgccatggctatcactcactactaaacatttcatgctttcgcccaccattcatcgaatttagtcatcagttgtcgcaaggctgcaccccgatgactgatttgatttttttgtgctggcgtcaattccgccaaggatttttgaaacttacttgaccaaaataacggatcataaccaaacccattgtcaccacggggggcaatcagaatacggccggctaactcaccgttaacgacaagtttctcaccactgggtttaagggcaaccagggtcgtatgaaaagtcgcggtccgctccgcttcaggaacgccaccaaggttggctaacaacttggcattattcgcagcatcatcatgatcaccagcataccgtgccgaaaacactcccggatcaccgtgcaacgccttgaccatcaagccggaatcatccgcaattgccggtaatccggttgcttcgaccacaaccgtcgcctttttagtggcattttcttcaaacgtgataccgttctccttaatttcaggaatatttggaaaatcagccaacgttttgatggtaatatcatacggtgccaacatcgcgctaaactcgcgcgccttattggcattgttagtcgcaatgatcaatgtttgtggtttagtcattcgcttcactccctaaatcaatatgttgtgcgtgaaagtccggttggcccaaccagttccgcgcgattgcttcgaattgatcagccgcccccgtcgtgtagtactcatccggataacgcttagtagaacgatcgttagcaatatccaagtaatcgagtaccgccgagacatcgttcaccgtttcggcaccagaatcaatcaaggtcaccccaggccccatcacattttgaataagtggccgcaataatggatagtgtgtgcagcccaaaacaagcgtatcaacgtcttgtttttttagttgtttcaacgtttccgcaaccacccgcttggcaaccgttgattgatactcattcgattcaaccaacggcacaaactttgggcacgcctgcgaaacgaccgtcgcagtaggatctttggttaagatagcatctcgataagcattactacgaatcgtcccctcagtcgcaatcacaccgattcgattacgatgagaagcttttaacgcagcccgcgaaccaggcgcaatcaccccaataacgggaattgacaactgctgccgcaacgccggcaatgccgctgcggtcgcagtattacaagctatcacgagcattttgatctgctttgccattaagaaatccgccatctgaaaagaaaaagttcgcacttgttcagctggtcgcggaccgtatggcaaacgcgcctgatcaccaataaaataaactgtttcgcgcgggagttgtttcaaagcttgcttgacgacagtcaacccgccaacccccgaatccatgaagccaattgcatgttcatttgccattttaaaatctccgttcactgaattctgaaactttattatggtcttttttgaaattgatttcaagccagaccaattgcgacgaaattgtaaagtttccgttgataaattgaaaaaaaccgacacattagtggaaacggggtataataatgattatacagtggctagagtaccacgattttttgcatggaaaggaattatcatgacgaacgacttttattctcaatttgcgggcaactcgatcaaagcttccatcctcagtgtggaaatcttgcgagatgccttaataccaaagttattgggtgatgacagtagtggcatcctttactgggcgggtaaagacttggcacgccagtttcctgtcgctagtgatgatgatcttgttaccttttttgagcaaaccggctggggtcaccttgtcgtgattacaacgacggatgatctaatcacgtatgaattgactggtgagccggtcgctcggcgtagcgccacgatcaaatcaccagactttatgcttgaaactggctttctagctgagcagtcggcgctccgcaccaactgtgtgagtgaagctaaaattacgttccaaaatcgcatgcgactgcgcatctcagttacgattgatcacaatcaaccaatcgtcaatcacgatcccgcaacaccaatcgaaatcgtgcggcctcaagttgaacttgatgacgaacaacctgaagaagcacagtaaaaaggacggccacgtggtcgcccttttttgcaacgttaaatagttttccttatatagtcattattaacggttgtccctggtcttaaaaaagagcgcaaaaaaacgcgccgttcacttaagaaggcgcgttcgctagcgaaccattaatgaaataatggcccagcttattatagatattgagctaaagtttgttggatctgttccttggaatggtagccaactaaggtatcaaccacttcgccatccttcttaactaataaggttggaatgctcatgataccaaagttgctggccgtttcagggttggcgtcgacatccatcttattgaacgtcaccttgtcacccatctcgtcagctaattgttcgaccactggtgactgcatccggcaaggaccacaccatgtcgcccagaagtcagttaacgttactcctgaagccgtatccgttgtaaaagttttatcagtagttgctgcgaccattataatcggcctcctttaagctttatctgttactaatagtaagtataccagtaaccgggtggaacacaaacaatttgcctgcaatcaaagcgccgatatcgtgcacagccatgaattcgcgtcatcactgatctgcacctggcactcgtcactggttatttgaactgcacctcagtcgcaccattgccgccatgatttggcgcagcaaagtgaaacgacttgacttgccgattagacttgagatagttggtaatgccttctcgtagagcaccagttcccttcccgtgtacgattgtgacggaaggatacccggccaacaacgcagcatcaatatagcgatcaacttgagtcatcgcgtcttcataacgcacaccccgcaggtccaagttcggcgaaacgtgactcgcgtgggcactctgaacagtagcacgcgcgcgttttggctcttctggcttaacgcgttccaagtcaccgtcactaatcttcatcttcaagatgccgagttggacttcccactcgtgtttacccatctgacgcatcaacacaccacgttgaccatacgatttgaccagcacgtcatcaccttcatgaaaatcatgttgggctttggcacgccgtaatacacggtttttcttgagcttaggctgttgctccaatgcattcaacgcgcccttcgcatcaatcaactcgttttctttgacagtcgccgtaccactcgctaattgtttcttacgcaaatcactaatgatagcatcggccttagtcttactttgctcaacaatggtgttcgcctgcactttggcatcttcgatcaactgatctttacgctgttgatacgcattgaattcgctcttcaactgccggtgcaatttttcagaatctgccacttgggttttcagatgcagttgttcatcttcaacctgtttgcgcttcgtcaccaaatccgcaatcattgcgttgaggtcttgactatccgtatccgtcaacgaccgagcttgatcaacaatcgcttgcgggatgcccaaccgctgtgcgatatcgagcgcattacttcgaccaggaatcccgaccaatagccggtacgtcggcttgagtgtttcttcgtcaaactccatactagcattgatcgtatcaggtcggttaaacccatacgccttaagttctgggtagtgagtcgtcgcaacgacttgggttcccttggccccaatggcatccagaattgcgattgccagtgccgcaccttcttgcggatcagtcccggcacccaattcatcaacgagtactaaactgtgagcgtcgatctgcgctaagaaactttcaatattttccatatgggatgagaacgtacttaaattctgttcgatcgactgttcatcaccaatatccgcaaagatctcattataaacgccaacgcgacttccggcttcaacaggaataaataatcctgactgggccatcaattgtagtaatcccagcgtcttcaacgtaatcgtcttcccaccagtgttaggccccgtaatgaccatcgcctgataatcagtacctaaactaatatcattggcaacgactttgcgaggatcaatcagggggtggcgtgcttgccgtagatagacttcatttttgggtgaaacggccggttcagtcgccttcatatcatgcgcataacgcgccttggcattgataaagtcgaaatgtccaagaatcgccgcattattaatgatttcgtcctggtaaggcgcaatcaagttggagagttcctccaagatacgctgttcttcttgcttttccgcaacttgattttgccgtaaccggtcattcatcgccatgacagcctggggttcgataaagagcgtctgcccactcgctgattgatcatgcacgatgccaccaaaccgactgcgattctcggccttgaccgggataacgtaacggtcgtttctaatcgtgatgattgggtcgcttaaatacttggcatcatggccacgggtataatgacccatttggttacgaatctccgtttcagtacgacggatattgctccgaatccggctcagttctggtgacgcctcatccgtgatatgaccgtcaccttcaatggcagtagcgaggcgcttcgtcacatctggtaaagtaactaattctgcaacttcatcaaacaggtgtcgaatatcattctcaggtgcatcttctagcaactcggcaaaaaagcgcgtgattgcgcgcgttgtccgtaacacccgcccaacttgcccgagttcactcccattcagggtcgcaccgatagctaaccgtttcatatgcggttttatatccgctaaacgagcgaccggaatgccaccctttaaacgatacacttctgccccgtcgttggtttcatctaaggcccgttgaatatccgcaacgctggtcattgggtgtagttcattgagtgcttgttggcccgttgccgagactaagtatggtgctaattgttgttttacttgttggtactctaacgtattcaatactttggaattcactgatatccctccgaagttccaatgaattacgaaaagccgcaaaaaaacggacaatgcaattacttgtcggcatcatccgtttgcattttcaataattcagcttgtttgtcaacctgatctgaaatcgcattgaatgcgagcaacgtcgcaatctccgtatcagacaaatcgggggctaatttttttaattgtgccacttgctcattcatcatccgcgtcaccgtttgcatgtgacggtcagatgccgtgccaatgatcgtgtaagtacgaccatcaatttccgctttaaagcggcgcttgttagcagtcatcaacatcccgcttcctttcaataacaattaatattctagcatggttatcacaattatgcgacagttagaaccgtctcataatttctaaaaaagcccgcggacatgcgcccacgagcttaatctactttcgactattgcatgccaccgtcatcggctaagaaggtattcaaaacttgctcaaccatatcccattcgtcgtccgactcgatcagttgtaattcgccattgtcgccatcttcaggattaaagatgtaggcttgaatatcaacttcatcatcggccgcagcatcagctggatataataaaatataggagtgaccgaaatcttctgaatcaaacgtgaacaaaatattaaataaggtttcgttaccttcgtcatcaactaatgtgatcacatcattgtctttacgatcttggttttggctcatgttagttcctcgctattcttgtgtgagtttgccgtggcgatccaagtagttttgcaagattaaacttgcagctagcttgtcgatcacctttttgcgtttcttacgtgaggtgttagcttcttcaaccaacatccgttcagcttcaacggtcgtcagacgttcatcttcaaagtctaccggcaaatgaaaccgggctgtcagtaactcgccgtaatgttgcgccgcctcagcccgtggtcccaaggtattattcatattctttggtagccctaggacaaagcccccagcatccaattcttcaacgagttcagcaacccggtcgattccgaattcctcagcatcctcattgattcgaataatttcaacgccctgcgccgtccatccaaaagcatcactaatggcaacgccaacagttctggaacctacatctaaccccatcaacttcatgcatcaacatccttatctgcctttaagtaagacttgacaagttcctcgataatctcatcgcgctgatgcttccgaattaagttccgagcatcctttaagcgcgggatatacgccggatcaccggatagtaagtaacccacgatttgattaatcggattgtagcccttttcttgtaacgcttcataaactgtcgttaacgtgtcgtggacatccttaacgctgtcattatcgaagtcaaagtacattgttttgtctaatgaactcatatcaagcacctcccgctagtttccgcttctaatctattttactaaatgcccatatgaagtacaatcaatccactttgatgtaacacattcgtaataataacccggagaatgcagacgttttctgcaaatccatcccgatttacactgttttttcatatgctgacatacccctgtttcgaatgttcgaatagttgaaattcaaaacaggcacaccctttgtaacccaatcttctacgagttaagccggtcacaaggtgccataacattaaaaaatcagtaccgttagaacggtctcgtcctaacagcactgatttaattgttattttgatagctttaacatagctaaccaacataaaaaacaggatgtgcaaccaaagcaatcagtcttattgttcggcaagccactcatgcgcagctttcagcgccgctggtagtccagcaggcttcttcccgccagcttgggctaaggttgggcggccaccgccgccaccaccaacttttggtgcaatggctttgatcaagtcaccagctttgatacctgccttgaccttgtcatcactaacagcaactaataagttgaccttttcgccaatgactgttccaagtaccagtacgtcagaatactgcttggtcttccaagtatcggccaattgacggagttgatccatgccagagacttcaatttgttgggcgatcaacgtcgtaccgttcacatcgtcaacttgatcaaagactgccccagcctgctgtttggctaagcgactttcgaggctggcccggttctgttgttccgctttgagatcggcttgtaactgactaaccttggctggcgtatcagctaacttcggtgccttgacttgagcagcaacttgcttcaaggtttgttcttcgccggcaagcagttcgaaagcttccttcgaagtaacggcttcaatccgccgcgttccagcgccaatccctgtttcggaaacaatcttaaatagccccaattcactactgttcttaacgtgggtcccaccatcgaattcgatagaataatcaccaattgaaacaacccgcacaattttgccatacttttcagtgaaaaccgcaattgcgcccatcttgtgaccagtttcttggtccgtttgaatagcactgactggtaacgctgcccagatcttatcattgacgatttgttcaactttagctaactcttcgtcagtcacttgaccaaagtgagtaaagtcaaaccgtaaataatcaggttctacaagtgaaccagcttgtttcgtatgttcaccgagaacgtcacgaagcgcctggtctaacaagtgggtggcggtatgattcttttcgactttgttgtggaatgccaagtcaacgttcagcgtataagtcgcgtcttttcgcattggtttcaacacttcaacggtgtgtaaatgctgcttgttgggtgcattttgtacgtcagtcactttagccaccatttcaccggcatcatctaagatcacaccacggtcggcaacctgaccacccatttcagcataaaacggtgtcttgctgaaaatcatctcagcttgaccactgtcgacgtgatcaaccagggtctcgtcaacaataatgtcgttcaaagtcccctgcacattcgttaattcgtcatatcccacgtattcacttggcgttttgatgtcgatcaagagactccgttggacgcccatggacttggcactgctacgtgcattgcgtgcgcggtcacgttgagccttcatttcaacttcaaaaccagcttcgtcgacatctaaatcttcgtcgccagcgtattccttagttagttcgaacgggaagccataagtgtcatataacttaaatgcatccttaccagctagtgtatcgtgaccagcctgcttggtttccgcgatcaagttatttaacagattcaacccatcattcaaggtctcattgaagcgactttcttctgaagccacgatcttttcgatatacgcactatttttgagcacgtcgggatagtgtgaagccatgatcttgccaacaatcggtactaattggtccaagaaagcttctttcaaacctaatttttgaccatgtaggattgcccgccgaatcaaccgccgaatgacatagccacgaccttcgttggaaggtaaggccccgtcactaatagcaaacgtaatggcccgagcgtgatcggcaatcactttgaaggacacatcgtcctgggcgttatcaccgtagtgcttgccatcacttaattcttccgtcttatgaataattgggaggaataggtcagtttcaaaattggttttcgcattttgaaagaccgaaacgacccgttctagccccatccccgtatcaatattcttacgcgggagtggttcgtaagtaccttcaggagtgtggttaaattgcgaaaagacaatgttccaaacttccaagtaacgttcattttcaccaccaggatagttttccgggtcatcatcagctaaattattgaaagcttcgccacgatcataaaaaatttctgaatcggggccagatgggccttgaccaatgtcccagaagttatcttcgactttaatgatgtggtctggtttcacgccagttgcttcccagaatttcgcggcatccgtgtccttgggataaacagtcatgtataacttgtcaggatcccagccaaaccattttggtgaggtcaagagttcccaggcccaactgattgcttcttttttgaagtagtcaccaactgagaaattaccaagcatttcaaacaacgtgtggtgccgcgccgtccgcccaacattctcaatatcattcgtccgaatactcttctgtgaactcgtcatgcgggggttatccggcacaacggagccatcaaagtacttcttcatcgttgcaacaccggagttgatccataataacgttgggtcatccacgggaactagtgatgcactagggacaatcgtatgacctttttcatgaaaaaagtccaagtacatttgccgaatttcactactacttaattttttcatttaattctggcatcctctctatcattcttaatttaaggcaaaaaaacaccgttgctagcaaagacgctgttaacgcggtaccactctgcttgcaacgatgtgttcgtttacctcttaagctcattaacgctgagacacggactagtttgctagtcattacttctaggtagcatctaccccacaccgcactttttccagcaaccaaagtgtttcttgaccgatatgtgagatagatatgtccttactttgcaaagtatagaaaacttgcggcgacttgtcaatacaccactcagttattttgcattaatctatccggatgcacgtcaattaagacttacgatccttgcgttccttgcgggcagccgctcgttgttcgatgcggcggtccatccgcgccttatcgctgatctttttacgaatgcggcgtttgtaacccggcttgatctttttcttggactttttgacgtaaccaatcaaggttgggtccagtttttcctgttttggcccccgtttagcccgacgattacggtcatatgaatccacaatctcaccatcacgaatcgccttcggtttgaacttgatccccattgcttcaactgcactgaccttggcttcttcgcctgggctatataacgtaatcgcagtccccgccattccattccggccggtccggccaacacggtgaatgaagaattctaagtcattcggaatatcatcattgatgacgtgtgaaacaccttcaatatcaatcccacgggcagctagatcagtggcaacaacaaattgatacttcaattgttggacgtcgcgcataacccgctttcgttcacgtggttgaatatctccatggatcattgcgaccgttaaaccttgttggcgcaaataatgggtcaactcttgaactcgttccttcgtgttagcaaaaaccaacacgagatacggttcaccaatcgtcagcaagcgataaataatactgtttttatcgtgactcttggtggaaatcagccagttatcaatagtcggactaatcacagattctactggaatttcttccataactggattgttcatgtacttgcgcaaaaatggcgttaatttttgtggcatcgtggctgagaacaccaacatttgtaaatcagcaggcattcggccagcaatctggtcaaccacgttcaaaaagcccaagtctagcgtcatatcggcttcatcaactactagctgagtcgcacgatgcacatcgagtgcctgggagcgcattaagtccagaatccgtcctggggtcccaataatcaactgtggttggtgccgatttagcttttcaatctgttcctgcttatcagtcccaccgacatagagtccaatgtgaatggctttcgggctgtgttggatcaactgtttagcagcagtctgaatctgataagctaattcacggctgggcgttgtgataactgcctgcacgtaacgttcatcagcattcagttgattgatcattggcagtaaaaacgtatgcgtcttaccactcccagttgctgactgaccgatgacgctgcggccagcagcaatcactggaatcaacttttcctgtaccgcagtcggtttgcggaaattgatgtcagtcagtgcctgcatcaagaacggctgcaatttaaaatcttcaaaacttgcggtcatatttaaacctctttctcataatggctagcgacttggtcgagttctcgcactaccgtttcaatttcttgttggtctttagccttggcaccgctcgctaatgcgtggcccccaccatcatggttcttggccacaccgttgattgacggtccctttgaacgtaaccgaatacggaagtcaccttccttttgttgaacaaaaatcgcccagcacttaaccgtatcaatacgcccaggtaatgggacaaccccagcagtactagcatcaccgattgcaaatgaatcgagaatcgcattcgttaaaataacgtaagctgcacccgaatccaactgtgtcagatgttcataaacgtaggccgacaaccgtgcgactggtaacgtgatggtatcttcaatacgattgacagcttcagcatccgcaccggcttccattaaggccgctgctgctcgcatggtactaggcttggtcgcagagtatagaaagcgaccggtgtccccaacgatgccggcatacaacaaccgagcggcgttagccgttagcgttaactccgccgcaaggggtgcgtaccaattataaatcatctcactcgtactggaagcatcaacgtcgacccactgtgggtcaccgaaagcgtcatcgtttgggtgatgatcgattttaacaattgtcttaccttgattccaaagttcaccatcaattcggggctgattagcggtatcaagaattaatactagtgcgtcttgatagtccgcttcggtaacctcatccatttgtcctaaccagtcaaaaccatggtactgttttccaggtgtcaatacccgcttcgcaggaaagctagccttaatgatagctgctaaccctaactggcttccgatggcgtctgggtcaggtcgctgatgacgatgaatgatgattgtttttgcttgtttaattaagtcaaaaattgctgtttggacggtcataaatgaaccttcttactctcataatttactggtggcgattaaactgtcacagtactccagtataccgaagaatccgcgtcgcgccaaataaattaattatcatttggataaagtggtaacgttaagttctcaaacgccagtggtgccaagccagttagcgtgatccctaacaggcggatgccagagttaaaatgatcatcgaccacctcttcaaaaatctcttcggcgtactgctcaaacaaggccgcgtcattaggtatgaattcaccgaacgttcgccgcttggtaattgtgacaaagtcaccgtaacgcaacttgagaacgagtgttttaccgtggcgctgatgcgattgcatgctagctgctaccaacttagcgatggccttcaagtgcgtattaacttccgtcgtcgattggagaaacggtccaaacgtccgctctttgccgattgatttccgttcacgtaaatactcgactggccgatcatcactgccgcgcactcgccggtataaaatatagcccaacttgccaaattgtttgattaggtctaattcagactgtgcgtataaatcctgtccagtcttgattcctaaatcgtgcattttaggtaccgtctttttaccgacaccccgaaatttctcgatgggttcacgtaacaaaaatggttctgcatcctgtggtaatacgatcgtcacacccgctggttttcgataatctgatgctagtttggcaatgaatttgttgtaggagattcccgttgaacaagttaaatgtgtttgatgccaaatttcttgttgtaatcggtgcgccagttcgaccgcactatggatgtgtttcttattcgtagtcacatccaagtaagcctcatcaaaggcaattggctcaatcatctctgtatactcatggaaaatacgatgaatctgcgccgaaacttcgcggtacaacggaaagttgggcgtcttaaatactgctgttgggcagagttctaatgctttagcagctggcatcgccgagtgaacgccaaattggcgggcaacatagttagccgtcgtcacaacgcctcgcccacctgtctgccgaggatcatgcgcgatcactaacggctgcgtcttgtaggctggatgctcccgctcttcgattgacgcataaaacgcgtccatgtccacatgaataattttccgactcgtatccacccgaataggcgcttcaacaattgactgtgccatccgccgcccctccaatccttagtactttcattatacacgaacatacgttcaaaagcgcgtttcaagaccaaaaaatgagcaaaaaaataagcggtcatcagcaatgatcgaccacttatggtgtaaacctattttgcttcagaatcagcattatcgtcggcggctgagcttgccgattcaacttcagaagtagcagctgattcagccgctgtcccagattctggtgcaactgtcttagcttgtgcatcttcggctggagaaatcttagcaacagcgttcaaatcaaaaaccaagtagatgccatcacagtctaaagtaactgttttttcggtttcgttaacttcatcaacgaccccgtgcaagcgaccaattgtcgtaaccttgtcaccacgtttgattttgcttaacatttgttgatgttgttgttgttgtttccgttgtggacggatcatgaagaagtataagaatgcgaacatgaccacgataaacagaattgatgccatttgacccatttaatatcgctcctactctaattaaaagtttgactatctttaactttaacaaattacggtctgaaataccagtagcactaaaagtttttcgggtttttatcgttaaaaccgtacatttcaaagaagttctggcgaaactccagtaaattatcatccataatggcttgacgaacttgcttcattaagtgtaacaagaaatataagttatgataactcgtcaaacgcaaaccaaacgtctcgtccgccttaatcaaatgacgaatataagcacgcgtgaaattacgacaggtataacaatcacaattatcatctaacggggtgaaatcgtgagcgtaggccgcatttttgacaactaaacgcccatgggacgtcatgcaagtgccattacgggcaatccgagtcggtaagacacagtcaaacatatcgaccccacgaattgcaccgtcgatcaaggcatccgcagagccaactcccatcaagtaacggggtttattttctggcaatagtggcgtcgtgaagtctaaaacatgattcatctcagccttcgattcacccactgataagcccccaatcgagtagcctggaaagtccaagctaacaagatctttggcactctgttcacgcaagtctttaaagcccgcaccttgaacaatcccaaataagccttggtaatcagggtgttgatgaaccttcaacccccgctctgcccagcgacttgtccgggcaactgacttgctaacatagtcgtaactttcaaagaatggtgggcattcatccaaactcatcatgatatctgggccaagatcattttcgatttgaatagccttttcaggagataagaacatctttgagccattcagatgattcttaaagtggaccccttcttccgtaatatcacggtttttagccagggaaaagacttgaaacccacctgaatccgtcaagattccctttttccaattcataaactgatgtaacccgccagcttctttcacgatttgctcgcctggccgtaaccacagatggtacgtattcgataagataacacccgcacccatcgcgtctaattcttcgggtgccagtgacttaacactggcttgcgtcccaacgggcataaacatcggtgttggaaaggtcccgtgtggcgtaatcaattcgccaaggcgggctcctgtgtgtttttctttcttaattaatcggtatttaattgccggttccatatctgttcctccgtattaaaatgttgctaaactcaaataatgatagcacgaaatccagccgtgaaccagtcgcggcaattggcgtgggcacccacgtggctttagtcagtctgttaacaaagcgttcaaacgtcaaatagtcgcctcaagaatgcattttaacttcttgaagcgactattgacaatctttattatctccagagctaaaacggcagcttgaaattagcgatacgcctcgtataatacggcattttaatattcaaccgtcatccgtttcaaaataagcgatctcgtttaaagccagttatactagtgaataaacatcgcatcgccaaaactaaagaagcgatacttttcatcaatcgcatgttgataagccttcaaaatcatatcacggcccgtaaaggcagccactaacatgaccaaggtcgacttcggtaaatgaaagttcgtgatgaacgcatcaacgactttccattgataaccaggtttgataaagatatccgtccaacccgaatccggcttgatttcaccatcaaacttactaccaatggtctctaacgtccggattgacgttgtcccggttgcaatgatgcgcccaccattttgccgtacttcattcaacgtcttagcagcatcttcgtccaatcgataaaattcactgtgcatcttatgatcatcgatattatcttcttcaactggccggaacgtccctagtccgacatgcagcgtcaagtaaaccaacttaatacccttgtcttgaactttttgtaagagttccttcgtccagtgtaaaccagctgttggcgcagctgccgagccattttccttggcataaacagtctgataacggtctggatcatcgagtttttctttaatatatggtggcaatggcgtttcacccaggctctccaaaatttccatgaagatcccatcgtaatgaaactcgatcatccgaatgccatcttccttttcggccgttacggtcgccgtcaacttaccatcgccaaatgagatcacggtaccgaccttggcacgtttggcaggtttcatgagtgtctcccattcatcaccttccgtattatgcaataataggacttcagcgtgaccaccagtttcaggtttaacaccatacaaacgagctggcataacgcgggaattattcataacgaccgcatcgcctggattgagttgatcaataatatcgtagaaatgcttatcttgcatttcgcccgtttggcgatccaattccaacaaccgtgaactatcccgttttttgattggtgtctgggcaatcagttcatgtggtaaatcataatcaaaatcttcaagtgttaaactcatgttgtgacctcttatctttatttattttctgggtatgggaatcccaaatgctgataacctttaattgtaacaacgcgtccacgttgtgttcgcttcaagaacccaatctggagtaagtacggttcgaccacttccgcgattgtatccgtttcttcaccaatattggccgcaatcgtagcaagcccgaccggacccccgtcataatactctagcatcgttcgtaagagcttattgtcagtctcgtccaagccggcatcatctacgcgtaaatatgtcagtgatcgcgccacaatggcctcatcaatggcatcttgatccgccacttctgcaaaatcacgaattcgcttgaacaagcgattagcaatgcggggcgttccccgtgagcgacgcgcaatttcgtgggcacccgatggtttgatactcgtttgaaaaatatctgcagtccgcttaacgatatcttccaaatcagcaacttcatagtacgccatatgttcgacgattccaaatcggtcacgtaacggagctgacagcataccagctcgggtggtcgcgccaatcagtgtaaacggcggcagtggaaagtgcacgggatgggcggttggcccctgtccgaccacgatatcgacaaaaaaatcttccatggccgaatacaacatttcttcaacgattttcggtaaccggtgaatttcgtcaataaataagatatcacccggctccagttcattcaagagcgcaaccaaatcacctggcttttcgattgcagggccactggtcgtgcggatattgacctgcatctcgttggcgattaccatcgctagcgtggtcttccctaatcccggtggaccatacagcaaaacgtgatccaaggattcctcacgcttgcgggccgcttcaatatacactcctaattcgtgcttgacccgggcctgaccaatatactgggctaacgtttgcggacggagcgatttttctaatgacgcctcttcgtcatcggctttgtcaccggataataacttgtcatcgtccatttagttacccctcccatctacttcttcatcaatagtcgtagtccttcactcaacaaggtgttcgtatcggccccttgtgtctgactaaacgtctccaacttcttagtgaccttcttgacatccgctttcgaatagccaagagcttccagagccgccaacgcgtccgctaacgcgccatcaacagcaggagcatccacatcgagcgcagtttgaccagtaacatcaacgtttagatcgtttaatttacctttcaagtccagcacgatttgctgagctgtcttcttgcccacgccaggaaaactcgtcagataagtcgcattctcttgattgatggcttggatcagacctgcatggtcgttgttggccaaaatcgcgagggccgacttcggaccaattcccgaaaccccgagcaacttttcgaacaacgccttctcgtcagcatcaaaaaagccaaataggctcatgccattttcgctgacggcttgatggatatacatcttaactgctgttgggcccacctggtaacggtatggattagccgttagcactttataaccaatgccgctgacctcaatcaccacataaccgggggttacatcggtcacttgaccgagaaaatattcgtacaccgaaaaaactcctttaaataaaacgtatgtttgcttgctaaattgtaccacattttcacagtggcttaacactggtgcaccgataaaaaccaaattttaatgttaaatcaatttcacctcgattgacggatttcgtggcaagaaatgcttgccgccacgttaacgtcatgctatgctcaaagtcctagggaggtctcgctatgcaactcaaaccgtttaaagcggtgttaccgaccacaactggtcaaactaaaattcaaacagctgcgaccaattgggacagccaggatacaatgacgacaaccgaagccagctattactggtacgaactcacactcaacggtgttcaccagtggcgcttaattggcagctggccggtggatcaaaccgtgacgaccatggttcccggcatgatcaacacagtcctttacccacagcaacccgttatcgagatgttgattgacgactgggtcggtcattttgccccggtcgtcgaggtgacggataccgcgcacgtcacacatcgactttggcagattactgagtctgaggtcaataccgacatcacaacggccatggcacccgttactccgcagaaaacgtggttgacaacggtcagcacgccactcgtcatgttagtctcaaccagtgaatggcaaaaattagccaccgcaccagtcattcccgaacagttaattgcgttagcgacaacctcataattaaccagtcgtggctgttaattgtgaatttcgctatggcatacattcgtttgtgttccatctaacgttaaataggcttcttaggaatcaaagttaattcctaagaagcctattttaataccgatttactcaattaagattgtctgacacgtttgtgaagcccccaccagcaggcaatcagtatgctaatcacaccaccaataatactcgaccatatgccgatttttagtcctggtgtgtgatacgtcaatcgaatctggtgccggccggctgtcaacttggcccccacaaaccctttgttgacaacttgagtcctaacggtttgaccgtcaactcgtagctgccaaccagtcgaatacggaattgacgttgttaacacggttgctgtcttagtcagcgtggttcccgtaatctggttgttcgtcacttgttgatgcttcaacccactcgtctgtagttgccgcgtccgttgacgataagtcttcccaagcggtacagcgatcagtttagcggacttaaaatgcaaactacgaatgctcgtaaagttcagcgtaatcagcttacgcgcgtacttgctataccctaagttgattactgctgatgtccggggctcatagtctgacatattcgtggtacccaactgactaaaactcgtcaagttatccgttgtctgagcagttaaagaatacccactagcgctcaaattgcccttcagaccatcgcgaacatcatctagataatcgactttggtatacggacgggccgtgaacacgttgatattttgactcgttgtcaaggcgtgcttgattgaggaacgccgataactgatgccatctagcacaagatagagttccgtatttcgatacttcttagggtgttgaatggtcaattggtacggtatctggtgcccctgcacatcactgaccatgctcgttaactcgtcggcattgttttcctgatttttctggactaacttttgattagctgcaatcaagttcaacacgcggtttgacggtgtcgtcaggccagttgccggcgtcaaactttctcgttgttccggcgttaatgtgatcgtatctgccggtaacttagtcaacgcgttgttcgacgctcccgttgcatgttgattgcggtaaataatcaccttgtccaacgtatccaaaacattcgtcgtatccgcttgaaccgtataagcgacgttttttccggtaacggttggcttgacagtcttaacaccactaacctgctgcgtagtgactgcaccttgtaacaaggcttgctcgcggtcaactgcgttcaagcgattaaattggcgttgactaatctgatgctgctgtgtataaactaacggcaacgcattcttggattttaacaagatcgtgccggtatgattactcatgccataaataaacttgtccgcaaaaatcttcggttcgccagttttcatcttaacaacctcatatccggctggtaaggcttgtttcttcaactggtcctcacgtgcaaataaatatttaacacctaataagttatacatcgtcgtccgaccgtccaacgaaccgagtggcgagttcatcgcatactctgagttgcctaaggcctgactaaatgcccccacgtaaccattttgaactgaaaaatacgatccaaccgtgtgagttcctaacaccatcggcacatcactctcagccgaacgcatcgtatagtagttgggtgccaaagccgttcgataaaattggctagtcgtggttaaacttttttgcgcgccatcaaaataatttttgacccatttcattgccgcgccctgccgcaactgctcagtactattagaattagtattgatactcaaccagcccagtccgttattcgccaggttcagcgtgacaattcccagtaataacacataaaattgccgattggtcaattttaaggattgtttggccagcaggaccccaattaacgctaacaagatgagatatgtcgcaatatcatgtttgcggatattgagatagaatccattgatcagccaaataatgacaagcagaccgccactaataccagccaaccattttaaatcagccgctgtcagagcagtgacttggtccataaatgccatcgtcgcataagcaaacacgagggttgccatcaacaaccatcgattagaaggtgttgaaaaaacgttgaatacggccgcaaattgaggcaacaaaatacccaacatcatcacgaccagtacccaattaagcacccaatagcgtctgaaatgacgtagtgtataaataattgcaataaagctaatgctactcagcccgagggtcacccagtattggacactgccaccattggtcaacagtcgattgggtaaattaacgtaataattgatgggataacttgtcaagccattcgcaaagttaaaactcgcacgcgttgccgtcaacatcgcgagcagcgtgggcactagtaagatgcctgccatcgtgacaccaagaccaaccgccactagtaaccgccaaaataactgtccaaacgaccgcatcgttaaatgatcacgacgacgtgaccagaaacgcaccaaagcatagactaagccgcccaatgcgagtaagtaagcaaaatagaagttactcaaaattacaacggcggtaatcagactgagtggtaaccaatgtcggcctcgtaagacccgttcaatcgcccaacacagtagcggaaaccaaatcattggtaacaagaaaaacgggtggtgcatcccaacatagaacgtatacgcggtaaacgtatacgtcaaagctccaatcaattgactgacacgtttgaacttgaactgccgactgaaacctagaaaagtaagtccaacgaagtacaatcgcagcaagatcaacgcttggtaggcccattccaaatgagcgcgcgaaacaaacgccactaaataattaaacggatcaccgaccacgtagtaggaaaaagtcgtcagttgatcggcccccaagccgagattccatgaccaactgaataattgttgtgggtggtgctgtaagatccgctgaaattccaataaaatcgggaagtgttgggcgatgccatccacttcccaaatcaatgtccggccggctaagaaaagcccactgtaagtaatcgtcgcaataaccacaaacatcgccgtataccagacgactagtggtatcttccgtactgtcttcaaatcaggtgcccctatcttgtaattacgtcgacaacgcaatccccatattttgccatctcaaacaatgtttctattttaccatgaacaatttcgtctcgtgatgttcagtttgaatcttaataaattcgtgattcacagctgtcccatcaacaactaacgccaatcccagttatctaaagtttcaatcttagtagtcgccggataactcccaaacaactgtactaaaggttgtaagccactcacagcattatcacgttgtaagttgatcgtagcgattgccgcttgatcatgacggttaggatcgagctcaaaagcagcaacttgctcatataaattcagcgtaatcaatttggcgtcccgcgcacttggatgcgcatttaattcccacagcgtcttgcgcccggccacgaacgcgggcgtggcctctggtaaatctgccaaaaaacaatatgccgaataaacctggcgataataaagtttggtcatatccaaaacaatcaactcccaatcatgttgagtggtccaagcacccgatacgcgctcaccactcattttaatcaatgatagctaactatttaaaccaattcaatctgaaattttacaactcaaattagtgtcacaaacgccacttccccaatcttaaagttgttttttagaccgcaatactggcgacaataaaagtgtccctaggttttttaacccagggactactcaacattgctatttttattcgataacacattcggttcgtgattattcagtatcagtcatgattaaaacgtgccatttcttaagttcaaaagcaaccagcttaagaccgctggaaaaagttcggactagcgtagacttgcttggtgtgtgcgccttacaccgacttccaggcatttctgccaattgccggaacgtggtgggcacagatttgagccgaaaaatcacgtctcaaatactggcctttcactaaccaagcacaagacgcttgctaagtgaaatttcaccactgagcattggccgaaacgccttccagtcgggacagtattcgaatggcagacggtgaggtacccaacttttgatgaattggtcgttgcttttcataaacggtaattttgtcaatcaactgtcagactaaaaataatattgagatggctcactaatcctgaatcggtatagtaggatttaatctcttgacagagtgcttaatgcacctagcgctttgtttaaacttccagcatcaaaatagtcagcgactaattgtaccaaattaggtggtcgttcatcagccattcgagcagtttcccgaccggaggggctgggtggacaatgctcagtagccaaattattcttagctggaagtggtctgcttccggcttagaataagactcgtatttgagatgacgcgggttatgcgttagctcaaatcgacgtcggctgcgttccagcaattgtcacccagccccggaggtcggcataggacgcacaccggctgacgaacaacaatctaaacttggcacgttttaatcataattcatgaaatatttacttgcacaatgcggatcgattacgaatcatactaaagtaacgagtacgccgccaataatcactttaatcacgtgcttcatgactatcctgaattcgtttgaacatccgttccatgtctgaattcgtgaagtgtaccgtcaccggacggccatgtgggcaattgaacggattctcgcaggtcggtaacttggctaataacgcgtgggcctgctgatcatccaaatggtgattggccttgattgcccgtttacaggacatcatgatagctgacttttcccgaaattgggcgaccgtcaacttatcatcctgtaagagccaatcaatcatttcacgaatcgtatcttcttcttgcccagctttgaaccaggtcggatgggcatgaacaatgaagctgttgccgccgaatgattccagatgaatccctaattctgctagtaacggcaatttttccttgatctttaaaacatcgctcgtcgggtaatctaaaataatcggaaccaataaattttgttgatccgcactaacctcacctatcgcttggcgataatattcatagttgattcgctcctgggccgcatgctgatccaaaatgtacataccatcatccgcctcagctaacagataagtcccgtgcatctgaccaagatagcgtaactgtggaaaacgttccgtatccggcgcttcactagtcggcgcgcttgcagccgtgctggtttctaacggttcagcagtttcaccaaagggtaaagcgcctgattctgactggtaacgctggtcaaatgcttgaactggagtagctgtcagttcgtcgcgatggctaatcataatcggcgggttggcagaacttgccgctgattctgacggaacaaccgcactaactgctgcacggtttaccgctgatggctgtgctgaagtagtacttaccatggtcgttgccgagctgggctgcatggttgccgctgccagcgaggctgcaaactgctcagtcgatgccggcgttgtcttatccgctacttgatactgtgacgaaacggcgttcaaatccatcgccagctggtctgtatttagatgttcacgccgatggctgccaagattggtcaatgctgacggaatcaagttcacatccactaaccggtccgtaatcgtggtgctgaccagtttggctaattctggttccttactcaaacggacttcttgtttcgtgggatgaacattgacgtccaccaataaaggatccattgttaaagcgatcaccgcgattggataacggccgaccatcaacttagaaccgtaacctttgatgacggctttggtcaattgctggttcttgatagcacgaccattaatcagaacagtaatatactggcgactggcccgcgtcagctcaggtaaagccacaaagccactcaatttaaaatcagtggtcgatccttgaatggcaaccatcttgcgcgcattttggacaccgtaaataccagcaatgacttgttgtaagtcaccgcgaccagccgtttttaatagctctttcgcattatgaactaaccgaaatgccaccgctggatagctaagtgcgatgcggttaaccacgtctaaaatattcgctaattccgtttggggggacttcaaatattttagtcgcgcaggtgtattaaaaaacaaatcagtgacggtaatgtccgtcccttgccgcaacggagcgggcgattgttgtaatagtttaccgccgcgataatgaatactcgtcccagtggcgccggtactcgtattcatcaccacgtccgctactgacgcaatacttggcaacgcctcaccgcgaaaacctaaagaatggacgcgaaacaaatcttcacgtgatgtgatcttactcgtcgcatgccgtttaaaagcggtcaggacttcagcgtcatcaataccgtcaccgtcatcgataacccgaattgactgaacacccgactcttgcaccaaaatatcaacctgcgtcgcgtgcgcatcaacagcattttcaaccagttctttaacgaccgaggcgggccgctccacaacttcgccggcagcaatctggtcggccagcacagaagataactcatgaatttttcccatttccatcggtcctttcacataaaataattaagctcgtgtcctgcacgaacattttcgattaccacaactagcaataactgactagtgtcgacctacctgtccgtcagacgcaccaatagctcatcataacagcttattgcgctcatttatgatgagttaaaatgcgcctacttacctaatttttgttgccatttatacagctggttcattacatccatcggagtcatcgccatcaagttcaacgtcttcagctgttgtaaaaccttttcacccttcgcatccgtcaccgccggctcagcaaataacgacagctgttcatcaccggcttcagcgaccggagcttcggcaaccggggtctccgattctactggctgtgactcatcggcggcctcaaccggcattgaagccgctgtgttaggtgccacgctattagcagcatcactagcagcaatcgaagccgctgtcgtcgataccgtactcgtttgattttccaaactcgttaaaatcttattggcccgttccaataaactcgttggcatcccagccaacttggcaacgtgcaccccgtaggacttatcggcggccccgggctcaactttatgcaagaagacgagctcgccatcctgttcagtcgcacccacatgcacgtttcgtaacccggataattcttgatctaacgcggtcaactcatgataatgcgtcgagaacagtgtcttggcatgaatatggttatgcacaaactcaataattgcttgggcaagcgccatgccatcgtaagtcgccgtcccccggccaatctcgtcaaacaacactagactattggctgtcgcatgttgcaaggcattattggcttcctgcatctccaccataaacgtactttgaccggaaattaagtcatccgtggcaccgatacgtgtaaaaatttggtcaaaaattggaagttgcgctgatttagccggtacaaaacaaccaatttgcgccatgatgaccgtcaatgctaattgacgcatgtacgtacttttaccggacatgttaggaccagtaatcaaaaggaccgtctcatcaggtgacattgtcacgttatttgggacgtaactctggttacccatcactttttcaacgaccggatgacgaccatcaacgatcttcaaatcatgtgatttagttaatttcggtcgaacaaagtggtaatcttcactaacgacggcgaaactttgcaagacatcaattgctgcgaccgccttcgccaatgtttgtagccgctgaattgcctttttaaccgtttcacgaacctttgtgaagagttgatactcaagatccgtagaatggctctcagcttctaaaatcaggctttcatgcgatttcagttcaggagtactaaagcgttcagcattcgttaacgtttgcttacgttcatagcggtccttcggtaattgggccaagttggccttcgtgacttcaatataatagccgaaaacccggttaaaccctatcttaagattcttgataccggttgtcgcccgttcctgggcttccaactcagcaatccattttttcccattattcatagcatcccgatattgatcgagttgctcgttataaccatccttgatcacaccaccgtccgttactgacaaaggcgcgtcttcaacgattgccgcgtcaatcaaatccgcaacgtcttcgactggatccagctgattaacttcatcattaaatacctgcgtatctaattccgataagatataccgaatctttggaatctgacgcaaggatgtcttgagttgcactaagtcacgcccattcacgctaccaaaagccacccggccagctaaacgctccaagtcataaactttagtcaactcttcttgtaagttactacgttcaaaataatgatctaataacgtcgcaaccttattttgacgcgtttcaatatcggccttcacaatcaatggccggtcgatccactgctttaatagtcgtccgcccatcgccgtcttagtttcatctaatagccacaggagagttccttgctttttaccagttcggatggacttcattaattccagattatacttggaattatgatcgagtttcaggaagtatgacggctcataagcgatcgccttttgtaagtgcgcgaggctccgcttttgagtcaccgtaatatacatcaataaccgttccacgacctgttgttccaaatcgaccgtcaagtcctgagtcaagtagctcaattcagcctggggggtgacgttattctgttctgaaattagaattcctagcgtcttaatttgatcgcgcaaatcgctagcaacagagtcgtcgaccacaatttctttagtttgcaagctggtcaactcgttaattagggtatcgttagtcgttaagacactcgtttttagttccccagtcgacaagtcggcgtacgcaaaaccatattgttgatcacgctgaatcagcgcagtcaagtaattgttcgtcttagcttgttccgcgccccgttccaacgtcgtaccaggtgtcacgagttgaatcacttcgcgtttgaccatgcccttggctaatttgggatcttccatctgttcacaaatagcgactttgtaacctttatctactaaaatatcaatataattttgcacggctcgatggggaaccccacacatcggtatagggttttccgccgaatgattccgcgtcgttaaggtcaactctaataactgagcacctttaatcgcgtcatcaaaaaacatttcataaaaatcaccaagtcggtaaaataaaaacgcatcgggatattgatttttaactgcaaaatattgacgcatcatcggtgtatcttttgttttctgtggcacgcttaatcctactttctatcgtaaatcttagtcatcaaaatatgggtggtccggattaatcaaaatccgggcaatctttttcgcccgaccactctgaccatcaacgtcgatcacacaacccgacaacactgccggactatcctcttgcacgttgaaacgggtcggcatttgttccaagaaacgctgaataacattctcacgggtcattcctaaaataccattatacggacccgtaaaaccaacgtcacttaaaaaggccgttccattgggcaatacgcgttcatcactcgtctgcacatgggtatgggtgccgactaccgcactcacctgaccatccaaataccacgccatggcttccttttcacttgtcgtttcagcgtgaaagtcgatgaagatgttaggtgtctcttcccgcagttgctcgaccaatggttggacagtcgtaaaaggatccgctaaattttgccccataaagacgtttccttgaagattaatcacggccaacttcaccgtattgaccttcacgatcgtataaccaacccccggagtcgtcgctggcggaaagttcaacggtcgaatcaacttcttagcaccattaataaaatcaaagatttcattattatcccaggtgtggttgcccatcgtaatgacatcagcccccgcagtcaagatgtccttatacacttcctgattaatgccgcggccgcgggtggcattttccccattaacaatagtaacttgtggcttgtagcgccgttttaacttaggtaagtacgtggtgaccgccgtttggccgacattgcccatgacatccccaacaaatagaattcgcatagattgctcccttgttttaacgttataccaattattttagcattatttagccttgaaaacgtgattgaattctgctggcaactaaaaaaatgagcttaggtcaagacctaaactcatttcccggttatttagcgtaatccactgctcgaacttcccgaataaccgtaaccttaatatgaccgggatattcaagttcattttcaatctgctttttgacatcgtgcgccaaaaccgttgcctgtaaatcagaaatctcgtttggcttaacgatgactcgaatttcacgaccagcttgaatcgcatagctcttcttgacgccatcctcattattagcgatcgcttccagcttctcgagccgatgaatataattctccagcgactcactccgagcacctggccgggcggctgaaattgaatcagacgtcgcaaccaacaccgcgataatcgacttagcttccacatcaccatgatgggaggcaatcgtgttaatcacgacggggctctctttgtacttcgttgttaattccacgccaatttcaacgtgggaaccttcgacctcatgatcgacggccttaccaatatcgtgtaataatcctgcgcgtttcgcgagtgtaacatcttcaccaagttcagcggctaaaacgcccgctaacttcgcaacttcaattgagtgattcaaaacattttgaccataactggtccgataattcagccgaccaacaagcttgatcaagtcaggatgcatcccgtgcaatcctaaatcaaagacagcttgttcaccagtttcacggatcttttcgtccatttccttacgcgctttttcaaccatttcttcaattcgagctggatgaatccgcccatcttgaatcagcttttcaagcgcgatctttgcgatttcacgacgaatcggatcgtaaccacttaaaacgacggcttccggcgtgtcatcaataattaaatcaattcccgtcagcgtttccaacgttcggatgttacgaccttcccgaccaataatccggcctttcatgtcgtcattcggcaaagaaacgaccgaaaccgtggtttcagaaaccatatcggcagcactttgctgaatcgcttggacaattaagtttttggcttctttttcagactgcgctttcacttcgtccgtattttctttaattaacacggcccgttcatgcgttaattgttcgcgcgtttgggtcaaaatctgatcgcgagcttgttcttgcgacaaggcggcgacccgttctaactcagcttgacgttgcgtgattagtgaagctgcactttgttgctgttgttcaacgcgtttttgctcattggcaatcttatcttcttttttacctaaagcatcctcgcgcttttcaaaagtattctctttgtgatctaaagtttcttcacgttgaagcaaccggtcttcttgcttttgaacttcattccgacgttgctttaactccgtttcaacttcagcccggtagcgatgactctcttccttagcttcaaggactttttctttcttatgagtctccgctgcccgtttggcctcagaaataataccttcggctgtgttcctggcaacgtccaattctttttcatggacgttcttgcgtacatagtaaccaatcccataaccgacaacaattgcgatgactgcgaggattataccgaaaacattcatgtttccacctccgcaccaccaaaatccagttaacataaaatcaactacaaattttcagatgttatattttgattatttacacacttgttattctaatgttagaaacgaatagtgtcaacttaaagtcttatggcaaccgctctctgcaggctacttttgtcgtgcaaacaagctaagtgtgtacaaaaaacgcccaaaataaatattttgggcgttgcataacaaactgtctatttttcggttggttggtcgccgagatcgagagcagtttccgctggtgtcgctttagtggacttactttgacccttactgccattcttagcagttcccttatccttagcttctttggcctgatcatcagtttcagacgtttcttcaccagttgcatccataccatatgcatcacgaaccttttggcgaatctccgtcatgacatcaggatgctcgtccaaatacttcttggcattttcacggccttgaccaatgcgatcgtcaccatatgaataccaagaaccactcttcttaacaatatccttttcagcagccatatcaacaatttcaccagtttgtgagataccttgaccatacatgatatccacttcggcacgcttaaatggcggtgcaaccttgttcttaacgactttgatccggacacggttaccaataatattggttccttccttgatctgttctgcccgccgtacttccaaacgaatcgtggcgtaaaatttcaaggcccgaccaccaggagtcgtttcaggattaccaaacatcacaccaactttttcacgaatttgattgataaataacgcgattgtcttggttttgttcaatgtccctgataacttccggagcgcttgtgacatcagccgcgcttgtaacccaacgtgtgcgtcacccatttcaccttcaatttcggcacgtggcactaaggccgccaccgagtcaacaactaaaatatcgaccgcaccactggaaactaaggcatctgcaatttcaagcccttgttcaccagtatctggttgcgaaagtaacaggtcatcaatgttgacccctaggtgttccgcataaacggggtctagtgcgttttcagcatcgatataggccgccgtaccaccctgcttttgaacttcagcaaccgcatgtagtgccacggtcgttttacctgaactttcaggaccgtagatttccacgatccgaccacgtgggtagccgccgacacccaacgcgtcatctaaggccaacgatccacttgaaatcgttgaaatagtcgtctgggcagcgtcacccatccgcataatcgcccctttaccgaaattcttttcgatctttttcagggcagtatctagtgctgctttccgtgcatcagccaaattatttcctcctttggtgctcgtttctaactcttaatatcatagctgttcaaagttagaattgcaagcaaaaagcgaacaaaagttcgtattatttttttaagtccgtatcttcattcaatgcatgtctcaataggtctaacccggccatcacactgcgttcccgaatttgttgtcgattaccagcaaaatggtactgcttggccttcacgggtcgatcacggtaagcaagaccaatccataccgttccagccggttgaccttccaaggttcctggaccggcaacgcctgtaaaactgataccaacatcagtatttagctgctgcttagcaccactcgccatggccttagcggtcgcttctgaaaccacgccctcagcgtcaataattgcttgtggaacgttcactagctgatgtttggcctcattcgcatacgttacaaagccgcccggaaagattgcggagaccccggacacactgccgatggtactctgaaacagcccagctgttaagctttcagcggctgtaatactcagcttagccgcaatcatttgattaataacagtagtaactaacgagttatcgtctccataaccgtaaaagtacggcccaatggtagccttgatctggtggtcaactttgtcgatcattccccttgcagccgtttccgtcatagcttgggcactcaatctgagggtaacctcgttagtcttggcatagggtgcgatcgtaaccgcctgctgttcatcaatcaaggggtgcaaccgggtcgccaattcagactcactgatgccataaaaacgcatcactcgcgaatagatttgggcttgttccccatatgcagctgccaatttcggttttgcctcagaatcaaacattacggctaactcacggggtggacctggcaataacaagaaatcagcactattttctgactgataaaacgcaccaacagccattccgttatgattagtcaacggttgcgcgcctgccggatacaatgcctgtaatcggttgttggccgtcattactttgtcattagtggcaaaccaggccgtaattttttgcattgctgcctgatcttcaaccaaggcaacattcaaataatgcgcgagcgtctgcttcgtcaagtcatccttggtcggccccaaaccacccgttaaaataactaagtcattccgctgggccgcaatttcaatgacggtcgacaaacgttgccgattatcaccaaccaccgtttgataatagctatcaattcctaattcggccaatccacgtgcgatgtacgtactattcgtgttcgtaatctgacccagtaaaatctcggtaccaaccgcgattatttctgcttgcatgccatatatgcctccccgtaatcctatcgattacactcagtgtgggcgcgatgattagcgtcctacattaagtatatacgaaaatgacgatcgaccccattaaaaagattagcattttcaaataccttcatttgacataacctgccaacgcgactcatcgttaaaattatcgactgacaggagtcatgattaattaataagggcaacacgttaatggtatacaaaaacgtctcaccgaatgcaagactcggtgagacgctcatgattaattttatttgaagccatctgcaaacacgtcacgattctgaacaaaataatcaatgccagaataaataacgaagaataagcagatatataacataattgccgcaaatggaatgtggattgccacaaataagacattgttcagcagcaggaagatgatggcaatcatttgtgtcgttgtcttaatcttcccgggcatagcagcagccatcactttaccattattttcaacaatcaataatcgtaaccccgttaccgcgagttcacgacacatgataatggcaacgacccaatcaggggccgcatttaaccgaactaagatgatgaacgcggtcattactaacatcttatctgccagtggatccgcaaacttcccaaaattcgtaaccaagtgttgaccccgggcaatcttgccgtccgctaagtcagttaatgacgcaaccgcaaaaatgacagttgcaaccacttgggtgactggaattgttgttccagcccacacaacctgtccccaactaaggggtaacaccataataagaatgaaaactggaatcagaataatccgaaacaccgttaatttattaggtaaattcaaagtacccgcctcctccgcaacgttatttgatggtcaaggtaatcgtccgaacttgtgacgtactgttcttcggattaaaattgaacgccttaccattgattgttacggtcgtggcagttgcgttcccaaactggaacttaaccgtcgtagcattacttggtaacgttaatgtatgtgagccatccgcctttagcgttccttgccaagtctgagtaccgttagtcgtaacggaagtccaagcagccttagtagacttgatgaccactttgttcttatccgcaccattcgtcaaagtataagccgtatcgctactgccgttagccttgattgtttgttccttggcagaagacgctttagaactagactttgctgatgaactagctttcgacgaactcgattgcttcttagaactcgaaacttgtacagaagaactgtccgcactcgtgctagagcttgaaccagcgtgcgtgcgaaccgccataaaccaaataaataacaaaatcaaaaccacaatggcagtgacgatgatcgttggtaaataattacgcacgcggctcgctggtgaagcaggttgttcgcgactagcaacccgggtaggttgaacttcatcaacattttcaacgatggtttcagtatgaacactcggtaattggtctcgatattcttctaacaacgcgttaccatctaaatcgacagtttccgcatattgcttaacaaacgcccgaacgtaaaaatcaccgggaagtttatcgaactgttcatcttcgattgcaatcaaatagcgtttctgaatcttggtgatttgttgcaaatcatcaattgtgaggcctttcgctgtccgggcagcctttaagcgcgccccaatcgttgttgtttcttcgttattttcactcattgactttttctccaccctaagtctattttcaaaatcttacggttaatagtatatcacagcaactaaatttagcagccccatgaccattaaatttcagatttccttaactctttgcttgtggtcgaatctggtattcactgattgcctgagaagtcaataattgttcagcaaccgtctgcaagtctgcaagggtcaactgatcaattatacccggttcatcaaagattgtcgccgtcccgaatagccgttgatcataccggttcgcgattgcctccaaggagttcgccatgaagacgacccgcccaatcatttccttcttgactaatgcgagtgctgcttcctgaccaaccacagccgtccgccagttttctagcacatcaatgatggctgcatcaaactgggctggatcatccgtttcaccactaaaagtgacaaaattaaatccagactgtaattcgaaatcataaccaaacgtatcatcgatgataccctgatcatataatcgcaaataatctgctgacgtatcgccaaacaataattctaataaaacgttaaccgctgcacggtacttcaaagcagcagcccccgcttcaatcggcagcaagcctttgacaccaacgattgatttggcccgattgactggcatatcaatcgtccgataaggaataatgtcatgtccatccgttgcggtttcaggaatcttacgttcaatcggttgaaaggcagcaaattttttagttgcttgattagtcgtaatccaccctaacacttcgtctggatcaaaattaccaaccacaaataacgtcatgttctcaggatgatagaacgtccgataagcggcgtacaagtcatcagccgttatcttagcaatcgactcagtcgtccccgcaatatcatattgtagtgggtggttcggatatagattaccaatcattccgaaatacaggcgccaacttggatcatcatcgtacatctcaatctcttgcccaataatgcccttctccttgtcaactgtcgctggcgtaaaatacggatcttgaacaaaatctaagagggtcatgaggttgtcctgcaggtgccgggtagctgagaacaaatagctcgtcttcgtgaagctagtgaaggcgttcgcgctcgccccgtactgaccaaaaatttgaaacgcatcatggtcagccttctcaaacattttatgttccagaaagtgggcaattccatctgggaagcgttgcatttcagtacttccggctggaacaaaggtattgtcgatcgagccatagttcgttgtaaacgttgcgtacgttttgtgataaccggccttaggtaacaacgtcaccgtcagcccattatccaactgagcttgataacaactttcattaaattgatcatatttttttactttcatgcggttaccccactcaagaagaacccattattaagggtcaccatcttcgcgactgcaatgatctgttcacgcgtcacactttgaatctgccgtagccattcagtatccgtaacgcgttgttgcgttaaatcatcgatcaaggcttgcacagcgaatgtccgttgactatccaaactggactcaaaatcgttgatcaagcccagcttcagctgttcaactaaatcatccgtaaaatcaccggcttgaatcgccgttaattgggccgcaataattgctaacacttggtcatgatttttgccatcaatcccagcttgcaccttaagcaccccacggaaagtatccaatgagctgctggcatagtaagccagactcgccttttcacgtacattcataaacaatttagacagcggtgacccaccaaatagttcgttgaaaaccaaggccgcgtaataatgattgccacgataaaagactggcaaatcataacctaaatttagctttgcttggctgagtgcctgttgttcactcacttcgacgtactggtttgtattatgatgttgataaaatggccgtgggcgccccgccagtcgatcctcaaaaccagcttgttgccactgagctaaaacggccgcctcatcaacgtcacccgtcacgataatatcgatttgatcattttggatcatcatttgataatagtcgtacaaaccttccgcagtgagggctgccaaatcactcgccgtaccgtaacttggcacttgttgcgcaggttcgtccgcaaacaacgccgtatttaactgctgtgcagcataatattgcttatcatcagcgaccgacataatcgccgcttccaaattctttttttggcggtcaaacgtcgcttgatcaaactgaccgtccgccactagcggctgtaaaacgacttgttgtaaaaactggatggcctgatttgtcagtggctgatccgttgccaaataccgttcattcgcaacggtgatggctaattgcaagttatgcgttggtcccttacgactaacacccgcaccaaacgcagcaccatacatggcagccaatgcgttggctaacgctcgctgatctggataatcacgagaacttgtttctaataaattcgatagtagcgaccgctgagtaattgtttcacgtgcaagcggtgcccgaaaattgataataatctggttggttttaaattgatgactctgaaccgtcgtcaattggaccccttttgctaactgagtttgcaacatgtttcctccttgcatatgtaataaataataagcgaaaggccggattgacgcaactttccgtcctattgttttttttattttcagattatggtcgccaaaatgattattttcacgattaaattaaattctcgtgagtggcaattaacattgccaagtcgcgatttgtctgctattcttttcattattgataaaattaaggagcggttaatgtgaaagtaattaaatttggtggcagttcccttgctagtagtcagcaactgcaaaaagtcctcgcgatcgttgaggctgatcaaaaacgtaaatatgtgattgtatcggcacctggtaaacggttcgatggcgacaccaaagtcactgatttacttattcaatatgcccgtcaaacgatccatcatcaagatacgcaagccgttaccgcagctatcattgaccgttatgcagaaatcggtcacgggtttaacgttcccgaagcacaattgactccgatttttgaaacgattcgcaacttaccaaaacaatcatacgccgacaacacctacttgatggcagctttcaaagcgcacggcgaacgtctcaatgcgcaactggtcgccgctgtttttcaacaaagcggcctcaacgctcgctaccttgaccctaaagatgcgggaatggtcgttacggacgttcctgatgacgctcagattatcaagagtagttatgaccagctcgctaagtgggccaacagcgaacaaatcctagttatccccggatttttcgcctacaatcgtaacggccaaatttgtaccttttcacgcggtggctccgacattactggcgcgatcatcgctcggggtgtccatgctgaacgttatgaaaactttaccgatgtcgatgcaatttacgcggtcaatcctagtttggtcgcaaaaccagcggccattagtgaaatgacgtttactgagatgcgcgaactttcttacgctggcttttctgtctttcacgacgaagcgttgattccagcaatcgaaggcaacattaccgtcaacgtcaagaatacgaaccatcccgaggctccgggaactttgattcagtcaactcgcgaacccaatccccactacccggtgactgggattgccagttcttctagtttttgttcactatacttacgtaagtatctgctcaacaaagaagttgggctgggccgtaaaattctaacgattttagaaaatcatcatattagttatgaacacatgccatctgggatcgatgatttgaccatcatctttgatgaacatcagttgacgcccgaattagagaaaacgttagttgcagaaatctcaacggccatcaatcccgatgaaatttactttacgcacgactactcaatcttaatgctcgttggcgaaaacatgcgcaaccgcgtcggcatcatgtcacgtgccgccaccgcattagccaacgacaatattaaattaatcatggtcaatcaaggcgcatccgaaatttctattatgttcggtgtacacgacaatgatgccgatcaagccgttattgcgttatataaagaatttttcgattaacccatacgtccgactagtcaactagtcgggcattttttatggccgtgtttttcatcaattgttgttgaaaggtgccggcaattgaccccggatactcgttcgtcagcatgtacgtgtcctattccgacctccggggctgggtgacaattgctggaacgcggccgacgtcgatttgagctaatgcccaaccctcatcatctcaaatacgagtcttattctaagccgaaagcaacccactttcagctaagaataatttggctactgagcattgtcacccaacccctccagtctaaagtgtgcgagggatcacgggttgaatttaagcattgcctagtcaacggattaatgcggtttgggcatcagtccgttggcgtagcaagcacaggattcagcgtcaccgcgcgcgtttcgttaagccgctcgaatggctgattaacggccacttaacttggtgtaattggtcttttaataccggagcttcaaataaagcgtcaggtgtaaatctctatgtttatcgagaagttcaattattgctacattggttcagaaatagtgaaccataacaatatcattttctgtctgaccgttgcttgacaaagttatcgtttataaaaagtaatgacaagtccatcacaagttaggtacatcttcgtccgccattcgaatactgtcccgactggaaggcatttcggccaatgctcagcggtgaaattccacttagcaagcgttctttgcttggttagtggaagaccagtatttaagacgtggtcttcggcttaaatctgtgtccaccgcgttccagcaattggcagaaatgcctggaagtcggcttaggacgacgctagccaagcaagtttatgcaaaactcgaactttttccagcgggccttagctgattgtttttggccttatagcggcacctttcaacaatttttcgtgtataagtttaagccttcaatcccagtttgtctgcgtgccaatataaataggctttccaagacatcgtccgtcttggaaagcctatttatgattagttgctcaccgataactggggtcactgaatgacaagtcctgccacgtcacgttagttttcaactttttgattaccaaaccatttcttgttgatcttatctaacgttccgttagccttcaacgtctttaggccggcattaattttgcgtttcatcgttttgtcacccttacgcatcccaactgcgaagtcttccgacttaaaggtgccttgcgtttcttggtaatccgcagagttcgcttcgtgcttaatataatagctcgcgtagacgctatcaatcaagagccctttaattcgtccagcattcaagtcgaggaaggcattcgtgaaggtatcgtattgaactggcgttttcttagcaatcttatccttcagcagtttcggattgttttccaatgactcatagcccgaagaacctgactgaacacccaacgtcttaccagtcatatcgtcaaatgagttaatatgatttttctttaaagaaacgaggacttgcttgttcttcaaataagtattactgaaagccaccactttttcacgttggggatttttcgtgtagccgttccaaatcaaatcaattgtgccattgcgcaattcggtcgcattcatggaccagtcaatcgtttgaaagctgatcttaataccgtacaacttaaagacggcccgggcgaggtcgatatcataaccaactagtttcccagacttttcgcgaaagcccatcgggacaaaactgtcgtccaaaccaacgacaacgtaaccgcgtttcttgattttagaccaagtatcttgggtgtcagcgcgtttagtcacattttgaccacagccacttaacgtcgttgccatacccaggagcatcacaacgatcaaactgagtgcaaataatcttttcttcattctgacgccccctattgcttcttggttggttcaacgtggaacatttcatccgcgatattttcagcaaaggttaaatcatgggtcaccacaatttgagtcatgccatcagcctttaagcctaaaatcaacttttcaacttcctgtcgtaagttcgggtcaagtgctgaagttggttcatcatagcataagacattcggtttcatggctaatgcccgggcaatcgccactcgttgcttttgaccacctgataattcgaaaggatactggtcagcgtgatcaccgagattcaaacgatctaataaagtctgcgcctgctgttctgcttctgcgctagactgctttaagaccgtggtcggtgctaaagtaatattctgcatgactgttaaattgggaaacaattcaaaattttggaatacaacaccaatcacactatcgttactccgattagtataggggtcaaatggttggccgtcgactaagaactcaccggcattcaccttttcaagccccgtaatacagcgtaataacgttgtcttaccagcacctgaagggcccacaatacttagaatctcgccatccttaacggttaaattcaaattcttaataattgtccgtgaaccaaagctttttgtaatattttttagttctaacatatgatggcctccctatttccagtaactgtagtgtttttcgattcgtccaagcacaaaagtcgttacggctgtcagtgctaagtaaatgattccgactaatactaagggtaccaaagtaacatcgcgcgctgtcgcaacgttaccggcacgtaacaagtcgccgagaccaatgacataaactaacgatgaatccttgaccaagttgatgacttcattgccaactgacggtaaaacaattttgatcacttggggaataacgattttacgaatcgtctgccagtagctcagccgcaagacccgtgcactttcatattgaccattgtcaatcgactgtaacccaccacggaagatttccgcgaagtaggccgcgtagttcagaataaatgcgaataacgcggcgtagtaccgtggaaaaacaatcccaatcaacggtaagccgtaaaagacaaagattaattgcagtaacaacggggtaccacgcattaaccaaacgtagaaatgcaataaccattgcagcggcttgaagttagacattaatcccagaccaacaactaaccccaatggtagcgacccaatcagggtccaaatgaaaattttcagtgtcataacggcaccggataataatgatggcaaaatttctaaaatatactgcatgtactttccctcccaaatttacaggtcacattgtcctgcgtccactaatcggtcacgactcaagtacacaaaaaagtccccttgagtcgaatactcaagaggacggttatccgtggtgccacctcacttcgtaataacttcacagttattacctcagggagttttgtgataataaaaaaatcgtccttaggccagcatgcctaagaggacgatttaatcgcggttccacctcatattcactagttgctcacacaactaatctcaacgagtttatcactaaactccgccgctaacgaggccaaccgaaacagcttactaacttcagctgtccaactcacagatgtggttcgttgtaatccttggtcatcttcccatcatcgataactcgctcggcaaggtccttacaactactcttctgttccctgttttttaatgttgagttcatactaatcgaaaattaatcaaccgtcaagccttttttacttgccacgatgaaaaattccggcgattcgtgaccaaacacccggtttaggtgtatccaaattcattaatggcaccgtttcaccttcgattcggcgggcaatgttgcggtagccttgtgaggctggattcttaggatcaagaacgatcggttcaccgttatttgaagtccgaatgacggcatcgtcatcgaaaacgattcctagcaagtcgatcgataagtgatgcgtaatttcatcaatatccatcgtctcaccatcttgcatcatgcgcgtccggattcgattaatcactaacttaggtgcttcggctaacggatattgttccaataagccaacgacccgatccgcatcacgaattgctgaaatctcgggtgtcgagacgataatagccgcatccgcaccagcaatcgcattcatgaaaccttgttcaattccggcgggacagtcgagcaaaacgtaatcaaaatctggtttcaactcgtctacgattgcccgaacttggtcaggattcaatgcatccttgtccgcattttgtgcagctggcaataaaaacaataagtcatcaaaccgcttgtctttgaccaacgcctgccgtatttgagcacgaccggcaactacatccacaatatcataaaggatccggttatcgagacccaaaataacgtctaaattccgcaatccaatatctaaatcaactaagcaaactttcttgcccatcaaagcaagggccgtccctaaattggccgtagtggtcgttttgccgaccccacccttaccagaggtgatgacaattgcttttcccatcaaacacgtcctccatttcgagtaaatagcttcggtcgtacccgttttaattgctggagcggctggtagtccaacgcttgaatgtcattaatatagacgacgttcgtcccatcaacaactttttcaaggtccactaattctaacaattcaccgactcgaacccgcgggacggtcgctaaggggctaacgatcaccgcatcattgtgatcgggataaccggcctcaagcgcaccgtttacctcacccatcacaaagatactacccgtcgcccggagcaccccaccttcatggatcttaccgaagaacaacacgtcccccgtaatctcaacgacctgaccgttgcgaataatctgattaaccagatgcaccgtatcacgttcaatcatcgctaaagcatccgccgtcaaaataacatctgccgttagcttatgaatactgaataacggatatcgttgaatcaactgtgtcactttttgattttgttccgcagtcagtagtcgactagccgtatccaggtcaaacgagatttgtttatcagtcgtattatcagcctgcaaccgatccaacaagaccttcaagtcgatcataatatcatcgaaacttgcttcttgccgtaaaatcagttcatagccgtcattactggcctttaaaactacactctgttgcatgttagaattcctttctgccgactaattaacactcagatataaccgacgcattggataatataatatgacaaagatggctaggttgaccgcaatcgtcggtcctagcgtgtacaccgcaaagtctgctaacccactagagatcacatggctcatcgtgtaccaaatatacgtaaatgcttccaaaatggtcaaattaataatatagatcatcagtaacgttaaaaagttcaggtcgatccatggcttgatttgtcgacatatatagactaccaacggtaagccaatcatgtaaacgcctaaaatcccagtatagtaccagtcaaacaccaagcccacgaatgcagaccaaattccaaccgacagattatcacggtcatctaaaaagacagcgaagacaatccacagtaaaactaggtgtaagacactggcgtaggggtaactaaatagtttaccggcaaaaacatttgacaccgagccgtctaaaaagagtgcaacaaataacccaattggaaagatgatttttaatcttgagtaacgcaccgttgcacctccctattgttcagcgaccgtcacaactgttaagtcactaaggtccgctgcgggtgtgatttccacttcggatgctagcccgtaatcatcctgcttgacactagcaaccgtgccgacataaagtcccttcggcgtattgccgcctaaaccactcgtcacgactttatcgccttttttgattttaacgttagacgtcacggaacccatctctaaaagattattgctcttatcataacctgaaataatcccgttaacagtcttaccagcactattcgtaatctgaatagcaaacttattcgaagacgaactcgtattagaaattaattcaaccttagaattcgtttggttaacttccacgacccggccaattaaacccttttgtgacatgacaggcatattcttctttacaccggatgtcgcacccttagagatcacgagttggttcatccaagatgatggtgtccgcgtcaaaacattggcggtcaccgtcgtataatcagataacgaattatttaatttcaactgcttgcgtaactgcttgttttccgcacgcgtcgtctgggcactaaccttggcctgcgccagttggtcaacttgcttcttcaatttttgattttcttgataggtgttcaacaagtcagaaactgagttggtcgcactctgtaagccattgactggccaagcaatcacccggtcaaccgcaccagccacatcgtttccgaattgttggatcaatggtggtgtcgatttcttatcacgaatggctactgagacactcatcaagccgaaactaataatgaacacgacaatcgcaatcactagttttcggttagaaaaaaacttttgcataatgaacccccggtcgaaaattcaatgatttaacaataaataagcgggaagacgtcttcccgctcacctgttatcgctttttcataacgtcgatgctcttgagtgattcaccggtcccaactgcaacacagtcaagcggttcgttagcgatgaaaaccggtactttggtttcgtccgcaatcacttcggaaagattcttcaataaggcaccaccaccggtcaaaacaatcccgtggtcaattacgtcagaggcaatttctggggaagtttcttcaagggtttctttaatggctgaaataatttcagagaccacttcttggatggcttctgaaacatctacagatgagatttcaaccgtctttggtaagcccgacaaaagatctcgtccacgaatcgttgacccttccaagtcttcagcggcttccaaagaagctgagccacagtcgattttaagttgttcggctgtgcgttcaccaattaaaagattaaacttctggcgaacatggtaaatgattgagtcatcgatcttatcgccagccattcgaattgaacgacttgatacgattccacctaaggaaattgtcgcaacatcggtagtcccaccaccaatatcaacgaccatgctcccagttggatccatgactggaagccctgcaccaatagcggctgcaaatggttcttcaatgacatatgcatcccgcgcacctgcaacccgtgttgcatcaataacggcccgcttttcaacttcggtaaccccacttggtacacaaaccatgacgtatggcttaccatttgagcggccgagtgtcttttgaataaagtacttcatcatcgcaacggtcgtatcgtagtccgcaataacgccatccttcattggccgaatcgccacaatgcttgctggggttctcccaatcatatcccgtgcttctgaaccaactgatacaatttcaccagttttcgtgttcttcgcaactacggatggttcacgtaatacgatgcccttgccgtcaacgtacacaattgtgttggccgtaccgagatcgatcccgatattctttgtcccaaatccgaacactacattcatcccttcatcattaacaaatttaattttttatttagtcataatagtaagtattatagcatagtcgcactgcattaaaaaagcattgcctgagtcctagcataccgtaaattaatgaaaaatacagtcccactatttaacttagataaaatttaacaaaaaaacgcgatcaggccgattaaattatcggtcctaaccccgttattttaccacattctgttacgaatccgtattacaatttaacacgccctgctcggcaaaactaaagtaatcgtttacaccgataataaagctatccaagagcggtaaccccatcagttcacaagccagttgtaaccgcttggtaaattcaacgtctttttttgacggcgtcacatcaccactcggatgattatgtgcaataacgacccgggcagtcggtgtcgttagggcaactttaataatttcccgcggttgagccggacaactattgagcgtgccctgaaagacgacctggcgtttgatcacttgatttttcgtatctaagcataacaattgcaactgttcctgctctaagttggcaaagtcccgtgctaaaacggctcccagttgttcactaccatatacctgccccaaaattaatcgacttggccggggtaatagttgcccacatctgagcgccacgattaaaccttgccagcgcggattttcagacgactcatgtaaccactctatagcgtcctctatcgggtactcacgctcaaaggcctgcatcgcgctagtcaccgcgtcgttgggtaaaaacgtcccaaagtaggcttgcattaattcacgaacttgtgctgtcggtatttgttcttcgctgatcatcgtcattgaaaccaccctttctacctagtagtttcgtaaagtgaccggctaaccattaattcaccgacattttaacgcaattttttcagttaactcacaatcatctttgataatatcagtaccagggacgcagtattatttcttgcgcaattgtcttctaagcatccgtgtcagcccctaatcagtttctgagtcgctgccatccttgaaataagcccgtacgtcactaataaagtacagcgaccccgttagtagtaacgcatcatcactcgacatttcttggagtgtctgcatcaaggcagcttgccaattatcaaatacttcagcggtccggccatttggcatttcatgtgccaacatcgtcgggtcggtcgctggacgttttgcgttcggaccttcgaattgtgtcaaccgtaattgaacattaggtaatgcgcccaaggtctgaatcatttgttgatgctgcttatccgctaagaccgcaaagatgacataaacggtttgctgtccaaatcgctcactcaaagtagctgctaattcagttactgccggctcattgtgcgcaccgtcaatcatgatcagtgggtcctgattcaagcgttcgaaacggccaggccattgtgttgctgccacagccgctttgacgtcgctagtgaccacgggtagctgagtcgcttggtggtaagttaggtacgccgctattgcaacggccgcattatcaacttgatagtctcccagtagcggagttgtcaagtctttaaaatgcgcctctaacccgtcaaagttaaaccgttcttgccagccttggggcggtaataatttggttgtaaaatcaactcccaacgtccgcaacggcgcccgtttgctcatggcggtatcaatcatcacttgctgtgcttcagccggtaatttaccaacaattaccggcacctgcgtcttaatgatacctgctttttgagtcgcaatcgccgtcaatgtattacctagaatttgcatatgatcataaccgatcgtagtaatcacactaacggctggtgtccaaacattggtagaatcgtataacccacccaacccaacttcaataatggcaatatcgattggctgagcagcaaagtaaagaaacatcattgcggtaatgatctcaaattctgtggggcccccacttgccaatgtcgcgtcaagcttggcaacgatcggttgaatctgttgcaccagaccaacaagttcttcatcgctgatgggggtgccgtcaacactgatccgttcattgaagcgaacaatgaacggcgacgtgaaagttcccaccgttagcccatctgccataaataattcgcgtaaattcgcaaccgtcgaccccttgccattggtccccgccacgtgaatgccggccacctttaactgtggatcacccaattcatgtaagaattggcgcatacgactgagtgtcggggcttttttgaactgagtccggccgtgaataaaggctaatgctgctgaataagtgtcaatcatgttggtcttccttcctgtaaaccgcgcgaatcatcatttggccgtttgctcaccatacttctagctaatgagcccttatattttacgttttaataataaaatggtaaccatcccaaaacgggacgattaccattttaccagtaacacacatttcagttaactattatcgcaaattaagcttcagccttaatatcaactaaacgttgctttaaggcagctagttttgtctgattgtccgctaacttctctttttcactattaacgacgtcttcaggggcattggcaacaaagcgttcgttacctaacttcttcgtcgcccgtgcgacttcgctttcaaacttggcttgttctttttcaagttttttgacttcttcatcgaggtcaacaagttcagctaacggaatgtaaacttccgcatcactaatcacttgtgtcatggctaacttcggtgcaaccacgtcggcgccaattgacagtgtcttcggatgtgcaaaccgttgaatataatcttcattagctttgaaaacagcttgtaaccgagtgttgtccgtcttaattaatagatccacggctgatgacatcttcgcattagcttctgctcgaatgctccgaacggccgtaatcaattcaataagtgaggccatatcactttccgccgtttcgtcatcaaattcaggatggtcaacaggataagcagcgactactaaggattcaccaacgtgtggcattgataaccaaatcttttcggtcacaaatggcatgattgggtgcaataaccgtaagatttgatccaagacataggctaacacgttttgggtattggccttggcttgagcgtcatcaccggtcaagacttccttactcatttcgatataccagtcacagaagtcattccagataaagttgtacaaggctcgaccagcttcaccaaagtcaaacttatcaaaggtagtcgtcacttgtttgaccgtcgcgttcaaacgactcaagatccacttatctgctaacgtccagtcacttgcagctggtaattccggtttgtccatggtgcccaggttcatgataacgtaacggctggcgttccaaatcttgttaataaagttccatgcagcatccatcttcgtatagctgaaccgcacatcttggccagccgtcgacccgttagataagaaccaccgtaatgcatcggccccgtacttttcaatcacatccattggatcgatcccgttaccgagtgatttgctcattttgcgaccctgttcatcacgaattaaaccgtgtaaaagcacgtgtttgaatggccgtttgccagtaaattccaaactctggaacatcatccgtgatacccagaagaagataatgtcgtagccggtaaccagcgtatccgttgggaagtagcgcttaaagtcttccgcatcagtgtttggccagcccatcgttgaaaatggccaaagtgcacttgagaaccaagtgtccaacacgtctggatcctgttcccagttttctggatcttttggtccatcaacaccgacatacgtttcgccggtcgtcttgttataccaagctggaatccgatgtccccaccagagttggcgtgagataacccaatcgtggacgttctccatccattgattgaatgtgtcttcaaaccgatcaggcacaaattctactttattatcagtcttttgattcttcaacgcttgctcagctagtggcttcatcttaacaaaccactgagttgagagccgcgcttcaacctgaacgccagtccgttcagaatgcccaacgctatgcacaattgggtcgattttaatcatcaaatcttgatcttcaagatccttgaccatcgctttacgtgcttcaaaacggtccataccttcgtatttacccgcattggcgttcattgaagcgtcatcattcatggtgttaatccgtttcaaatcatgccggttgccgaccttaaagtcattcgggtcatgagcaggcgtgattttcaccattccagttccaaactcagggtcaacgtacgcatcggcgataattggaatttcacgttctgctaatggcaagatgacttttttgccaaccaattccttgtaacggtcatcactcggattaaccgcaacggcggtatcgcccatcatggtttcaggacgagtcgtggcaatttcaatgtaatgcttaccattgaaagtatagtctttgtcagcaaatgggtacttgacgtggtagaacgcacccttgtcatccttatgaatcacttcgatatcagacaaagccgtccgtgcttgaggatcccagttgatgatgtattcaccacgataaatcaagcccttgttgtaaagatcaacgaagactttcttaaccgcatctgacagaccatcatccatggtgaaccgttcacgagaataatccaatgacagtcccatcttagcccactgttgtttgataatcgacgcgtattcgtctttccaatcccaaacttgttggacaaacttctcacgaccaagatcgtaacggctgatcccttgttcgcgcagtttggcctcaacctttgcctgcgtggcaatgccggcatgatccattcctggtaaccataaagtatcaaaaccttgcattcgtttctgacgaataataatatcttgtaacgtggtatcccaagcgtggcctaaatgcagcttacccgtaacatttggcggtggaatcacgattgaatagggtttagctttcttgtcgcccgaaggcttaaataaatcttggtctaaccaagtctgataacgacccgcttccacggcggtcggatcatacttagttggcatatcagtagttggttcttctgacattggggcacatcctttcttttggcactaaaaaagcccactcatcctattagactaggacgaatggacttcgcggtaccacctaattttaaagccatcacaagtgatcgctttacagcttaaacatcgttgttaacgaacggtgtatcccgtccggctattcctactaaaacagttcagaatagcagctcgcaagctaccttcacgctaaaaccgccaagcgtgtttcactgttcacgctctctctgttgacgttgtttaccgctactctcttgctcattgctggttgtcactattgtaatgaatttcctgagtgccgtcaatccttattcgaattgttttaaggcatccagtgccgcaacgtaatttggctcgtgactaacatctggcacgatttcatgataaacgattttaccggccgcatcagcgacataaatcgcccgggtcaacgtcccattgttgggcaagtatagattggtggcgtaaccaaaggatagttcttcatcggaagccaccgttaagttcttaacgccttccttagcgcaccaaccagcttggtcagcaaccgcgttattggaaatggctaaaaattgaacgtgggggtacttatcagcctgttgattgaacttctttgtttgaatagaacaaactcgcgtatcaatatctggcatcacacttaacaagacaggcttacctagcaagtccttagtcttaatcttttcatcatgggtagtgaacactttgaacttcggtaactggtcaccatcttgtaacggttcaccgactaagtctaacgcttgatcatgaaataatacttgcacgtaaaacaccccttcgataactaatggttttctaatatttgtggtagtaatagtatagctcaaatttaacgcaatttcagtttccgcgcaaataatcgtctcaaaaattatcattcttgacatgcgacgcgttatttgacgttagtcatggtttaaacgtgcttattagttggtttgttgttcgtcagccgatgtgcgtcctaacgtgccaacatgtgtgtacgccgatttcagtatattcaagcattaaaatgtggtgtcgtcgccagctggagtgcaagttgggttgcacgttcgagcgaatcgtttgtttgttgttcccagcgggcagcgagtgtgttggccgggtcgtgcagactagttaaaatatgttgggcgacttgcaacgcgtgtggttgatgtaaactggtagccatagtttgtagcgcgtcagctagttgttcgccttcagttagctgtcgagtcacttgcataggggtttcgatggcaacttgttcgttggcgtgctgacccgcctgaatccaattatccgtactagctggcactggtaaccagagcatcagtaaaacgaaccacgttaagcaggtcagttgggacagatcgatgcccgcaccggcccatgggttcagatctaagttacgtaattccaagtattgaatcccatcctgacatagttgtgaatgaccaccagcatgacgcaaccgaacctgaccgtaaaattccttggtcgcacttaattttccattatcaacggccgcttgcagtgtttgacaataatcatttaacgacgcgtacgagaccgtaacacccggccgattggtatacccgctagaactgttgcgtaagcttcgaacgggctgggctggtggcgtaagaccagactgtggccagcagcatggtgagcagccataaagatacgtcagtagccagcgatagtgcaaataattctgcgcaatgtgcaggtaacagtgattttgaaaggtggtgaaatcacgactatctgtctgggcctgatacaatcccatcatcagactagccgccaagctcacattacagtgaacacctgacaacatttgacgtcgtcggccatagcggtgagcaagtccttgtcgataggcgacagcggccgcatccaacttagcgattggaatatcccggtcttctcgtggaagtgtgggcggcatgcttagcggccaaatcagttcaggcagaagcctttgccggacttgttgtgtgagcatcgttaaggcgtgcaacgcagcaaccgcacttgcttgcggttgggtgactaactccaactgtgtctccgcaaagtcccgttgcaggccggacaactcgctgataagtgttggtgataatgccgtatccgccaaatgaccggtcaccgttacccgctggccttcccgttccagcccaatctgaacaacctgtgcattgatcaacgccgtattttccattaataattgttgccactccatccactcacctcgctgattcaatctaaatttatcgtagcatagtcccgaccttggttggctgattatgacctattatttagctgacttaccattacgaaatgagcttccgcgcttgatcatccaaaggatcaaaaaaacgagtacccagtattaccgggtactcgtttttagggtaataatgggtctatgatatttagtgttgatggataaaatccatcaacactatttttatgtacaacaaaaggacatatcgtcctgtgctacaatcaagtcgaccaaaaccaattgaaagcgagtgtcagatatgtcccaggaccattctactaaagtactgctccaaattaaagacccaaatattactgatttagttgttcaaaaagctactaacggaagcttacaagtgcttgcaaagctaacgtatccggttactgtttgcgcacgttgtggcaaacgttccatggttaagaatggctttaagaccgttcacatcagaattcctagaattagcgaacgagtcaccatccttaacttaaagaagcagcgatttatctgtaaaaattgtggtaaaagtagtttaacaacgactacgctggttaaaaaacatcatcaaatatctgaaaacagtctgcatgccattgatctatcattaactgaagaccgtacgatggctagtattgcggctcaatacaatgtctcgaccaatacgattagtcgccgaataaagttactcggacaaggtacccaaccagctttcaacggactaccaacgatgctttgtatcgacgaatttcgttcaactggtaaacaaatgagttttattgcggtggatgcccaaacccacgacatcattacaattttaccaggacgtaagaatgccgatattaaagacttctttctcaatcattattctaaacgtcatcgtgaccgcgtaacccgggttgtgatggactttaattctcaatatcaacccgcgattcgaacactctttccacacgccaaactagtcgcagataactttcatcttgttcaaatggccttacgatctttgaatcaaactcgggtccaactcatgaaacgctttaaccctaagagtcgtgaataccgagtgcttaaatattattggcggttatatttaaaagattatgacagcctcgaaaagcgcaaacctcaatggtttgcgcatcttaaagatcgcatgacaccagagcaattagtcgtagccggtttaaatctagaccaacagtttcgacaaacctaccaagccgcacatgccttagttaaggcttttcaaaagcgtgattatcgatccttcaaagcagcactaggtcatgtcgaaaatgtcagtcctcagctaatgaccaatattaaaagctttatcaagaaccggcaactcatcaaaaatatgactaccggccgattatcaaatggtcccgtcgaaggtgtgaaccgtaaaatcaagcaaatcaaaagaaccgcgtatggttacaagaactggcaaaactttatttatcgaattcaaaatcaaaatcgaaaaaaagaacccaattcgtaaatgaattggattctaaatataacttcatcaacaccggttgacagagacccgtaataatatcacccgtttttgacctacaatagttcagcaaaaacgtcttcttgtgtattcaaataattttcacccggcttgatctcagtcattttaacaccagccaaagcgcgtgccatcagtccttcaacatcaatccgttcttcgtaggaccgtgaacggtctagcttcggatgcgtcttgggtgctggcggcgcaaaaatcgtacaacaatcttcaaatggcatgatcgacaagtcataggtatcaatatcttcggcaatcttaataatttccgtcttgtccatggaaatcactgggcgcaaaaccggcaaggtggtcacatcattgatggcaatcatgctatccatcgtttgtgaagccacttgccctaatgattcaccattaaaaatcgccttaccatgccgttgacgcgtaatggcgtccatcaaacgcatcattaggcgccgttgaacggtcataagataaccctcgggcactttttctttgatttcttcttgaatctcagtgaatggaatctgaataaacttcacgctaccagagtaacttgctagcgttgacgctaactgcttggcctttgctaacgcctgttcactcgtgtatggcggactgaagaaatggaccatttccatgtccacaccacgcttcatgccaaggtagccggcaactggtgaatcaatcccaccagaaagcatcagcattcccttgccagcggtgccgaccggtaatcccccggcaccctgaatcgtttctgatgataagaagataccgtttaaccgaacttcaacacgtaacacaatgtccggattcttcatcttaacttgaatcccgtcaacgtggtccaagatttgcccaccgagcatgtcattgatttgatttgtatcgtattcaaactgatgatcggagcgccgtgtgtaaattttaaaagtcatccccggtttaaactgggctttgaccatcgcaatcgccgtttcatagacggcatccatgtcggcatcgacgcgaatacttggtgaaaagttttgaattccaaaaactagcttcaaacggcccatgactttatcggcatcctcaccatttaacatgatgtgcatccggtcacggttcgcgtggacctttagttctggaaagtcgtgcaacgctttgcgtacgttacggcctaagctatcgataaagttccgccggtttttgcccttggtcgatagttcaccataacgtaccatgatttcagtgtactgcatgaacaagttcctttccgttatgcgtctgcattaatttttgagaatttttgataaagttgatcaaatactttaataaactggtcagcttctgccagcgtattattctcatcgaggctgacccgcacagcactcgtcgcaatgttttcttgcacgtgcatcgccattaaagtactggaggccaagtgtttcttcgatgagcaggcactcgttgttgagatataaatgccctgatcttcaaacgcgtgaacaatggtctcgccccgcacaccgttgatcgtaaaacacagtatgtggggtgcgaaccccgtcgttggctgactaaaaatcgtcactttaggaaacgacttaatgtgctcgtagattcgctgtttgatagctcgctcacgagctaccttaccatcttcatccgtgagcaacaatcgcagggccttcgccatgccggcaattgcgggtaagttctcagttccagaacgccagttactttcctgaccgccgccattcattaatggcgctaacttacgaccattgcgcgcgtaaataaagccaaccccgcgagtcgcatgaaacttgtgccctgaaaaggtcacaaaatccacccggtcattcatgatcatgttctgaattcctttaccaattccttggactgcatcaatatgaaaatgaattttcggatattgtttcagtagttccgccacttcaagtaaaggctgaatcgtaccgatttcattattgactgccatcgttgacactaaaatcgtgtcagaccgaattgccgctttcaagtccgccacgttgatgctgccttcctgatcgaccggtaagtaagtcacttcataaccaagttccttcaattgttccatcgaattatgaatggcaggatgttccaccgccgtggtaattagatgcttcccaaaggcccgcttttcaatcgctgtacccttcaaaacccaattatcgccttccgtcccaccagacgtgaagaaaatttcgtgggcttgcacacctagtaagccggcaatttgttgacgtgattgttccaacaaatgaaaggccgtttcaccaaagttatgcaaactagacggattaccccaaattttttgggaaaccgttgtatacgtctccagtacagcaggagcagcttgcgtcgtcgcactattgtcaaaataaatcattactacgccttctctttccaagaaagtgtgcattgcacttactttcgataagaattctttgcaattataccaaatattactagtgaaacaagggtttttgtttcaaatttctgattaatcacacgacaattgcgtcctaaacaccatttttgttggccgttcccagtcacccttctcagaaccatcacgattacttgcatcatgatgccaactaaaaaccagctggtggcggttgtcatttaacaatcaccaccagctggttattttcagttaactaaaattttgcatatgggcggtcccaactatcctcgtcaggcctcatcgttcatcttatcagcttgtttattcgcatagtaactgtcctcaatccgtttataggaccccggatcaactttatccacagctgttgcaattacttctaaactccgcgcgtagtcatgagtctcggtaaacaaccgttgtgcttccacgctggcttcttgcacctcttcatgattcgtcttgtaacggttagcgtattgtaagagctgttccgccataaccgcagcatccgttaaatcactggtcttttcctttaaggtcgccatgtccgcctgaataacaatcaactgtttcgtgatgtcgtccatattgatcacaagcttattaatatcatggtcaagccgttcgatttccttggcaactactttgaaatagtccaaatagtctttcggtagtccaggcaagttcaaattttcaacctggcgtttgatcgcgtggatttcaaaatcgaaccgttgcaacgtctcgtgggctttggactcttcagcggtcaaactcgccacacctttgttaattgccacttgttcttcttcaatgcctttcaactgctcatcttgttcggcaaaatgagctgcgatctcactaaagacagcttgcttactagtaatagctgtgacgtccgcctgataaacagcttcgatattcttcagttgttcgttcaattcacgcgtccgttcaacttcgccattattcaacgtatagctttgtgctaatcgatccaactcaatttgtaagcggtgattctgattcatggcatgtgtcaagaacttactgatttcttcttgttgttgatcaacaacggccttagcatcgatctctgcttgcatcacgtcatataagtggtcgatccgcttttcaatcgcatgattgccgttttcagcatccgtaactttcaaatcaccaagtaacgcaatattatcgtcgattgcttgctgtaacgctttgatttctggttcaatcgattcgacctcaaagtgaaaatgttgagccgttaattgttgataaccactagccagttcggctaactgatcaggaaacccactcactaggtccttataaatcggtggaatccgatcaatatccatttcaagagtgccagtatcgtgatgtaactgatccaaaaccttttcagccgcgtcatgatcgccagccttggctaattcggaaaaatgatcaaaatcactttctaagttagctaactgatcctccaatttgtcgatgctcggaccaaatgaaaagttttgcgataataacgtcttccgtatgttttggtacttcttctctaaactagccactgcttggcggtgcgcggcatccgcgtcatctaaggcctgcaagccctgacgaatttctgcctgtcgttgttcaatcgtatctaatgtggccgcaaccttcttcagattctgctgagcatcgagaaatctgatgccccgcgcctgcgaagtaatggccgttaattgctcactaacggcgggtaactgatcattatcaacttcttgaccagcgctctgcaacgcttccaacttcgctaacgatccgcccgttagtccgagttgttcaattttttcgaaatctgtggtctgcgattgcttgactagcgcctgttgccgttccgtcaattgacggacttgcttgtcgatataaaattgaaagcctttgaccgccgcgtagatgacaatcgcaaccacaacaatgccgattgctacttgcatacgaataccccttacattatttattccgttttaattgcgttgcgcctcaccctgttgagaaccgtaaccttgcttttttctgaaaatccaattaaaatctatcttaaattataacatagacgtaactaacggacagtaacaatttgttaacattcaaggaggattttttacatggctaccacggaaacatcacttatgaaccaacaactcgacgccctactgtttcaagaaactaacctggtcgcgaacttagctaatgctagtgccctcctcaacagtacttatgacaaccttaactgggccggcttttacttatttaacgaacaaactggcgagctcgacttaggtcccttccaaggcaaagtcgcttgcatgcacatcaaagttggggctggtgtcgtcggaactgcttttgaaacgcaaacgaaccaacgggtagccgatgtccatcaattccccggccacatcgcttgtgacagcgccagcaactctgagatcgtggtcccaatcaccaaggacggccaccaaatcggcgtactcgacgtcgactctccatcattagatcgattcaatgctgataacgaagctgaattgaccgaatttgtggcgattctgacgtcacacattgactaatcagcattaaacgtgttatgctactctttgtgtaaaataatgcagcagtgagtgggtaagctcgtcaacagattggtgccaatattttggtcagttagtaacctgcggctgcaatggtgaaacctgcagtccaatctgaacgaatatcgaacttacatcggattattttactccaactaaaattattggaggaaacattttatgtctcgttatacaggtccaagttggaaaatttcccgtcgtttgggaatgtccctttcaggtactggtaaagaattagctcgtcgtccttacgcacctggtgatcatggccaaggtcgtcgcggtaagctttctgaatacggtacacaattacgtgaaaagcaaaagttacggatgatgtacggtttaactgaacgtcaattcgctaacttattcatcaaagctggtaagattcgcgaaggtaagcatggtgttaacttcatgatcttactcgaacgtcgtttggataacatggtttaccgtttaggcttagcaacaactcgtcgccaagctcgtcaattagtaaaccatggtcacatcactgttgatggcaagcgtgttgacatcccttcatacgaagttagtgtcggccaagttgtctcagttcgtgaaaagtccaagaagttggctgttatcactggtgctgttgaagccgttgttgcacgccctaacttcgttcaattcgatgctgataagcttgaaggctcattaactcgtttaccagaacgtgaagaacttgaagcagatatcgacgaatcattaatcgttgaatactacaacaaactttaatttccggtatttaaaaaccgtcgcgtttgcggcggcttttttgtatgttctgttaatttcagacctgacgctcagcactcacagccgccatgaccggttgataaatcgacaataattgtttgaatgttgtgatgatcaatttattcaacgtatcagcatcttcaaataacggatcaccgaccaagactgcgcggcccacgaccaactcgctgtgtttatactgatcgaatttcttgatggcctgcgtaatattggccggtgttgcaagttgcgtggccggcaccccatgattattactgataacatagcccgccggcaaggccttcaaaagtggtgttaaatctgcgagttgcatctttgcctgcacggccggtttacactcatccaaaatatcaaaatagataaacaaacggtcaggccatagccccaattcaaaatgtggccaggctttgtagctccgtttgttttgactaaaagcgacccaagtgtctaccggcggattcttaaatcgccgtaaatgtttggcaacgtgcgcgtagaacggtggctcgctaggtgtttgtaaactcgctataatcgttggtgcgacctgttcgaacttaggatcgatcaccgttttgattaaatgcatgcggcccgctaacgtctggtcattaaaaatttcaaaatcttgatttgtaaacaagttttatcatccccaaaactaatttagattaaccataccgcattcactaacgcaacgctaccccccttcccttcgctattattggaggaacatgctacaatgataattactatcaaggaaaggatgttagacaatggctgaaacagataaacaaccagttgaccgcatcgaaacggccatgcacgggacgccaaagttgcatcccgacgaacaacgcaagtacctggggacctttcgggaacgcgtcgaagtcgcagtgaccgttgcccaaattaaacaggccaattacgtcgactcacttcatcaagcatttacgagccatccggatgaccaattatatattaatggtaatttagaccaggaactgattgggccgtatatcaaggcggctagtcaagccaatatcaaattcactatcaaaacggatgacatctaccatactgctgatgatgattacgcgcttatcttcactgctgcaagcgccattaaccaagatattattgatgttgcgcagcgttatccctcgcagacttcatcagcaacaccccaggccgagaaaacacctgggttgctagataaattcaaaaagttactttaatacaacaaaggtccccatccacgcacggatgaggacctttttacgtttgactgcgttaattacgcgctagagtgccataaagactcatgataactaaggccgcaacaatgatccccatgaggctgactgaaacccatgctgttgtgacgatactcagtagtaacaatatcccaccaccaactagcgtatagcccaaccaataacgaacacgccgccaaatcattggccgaatcgtgtgaccacctcggtgcatctgcgcgtattgatttgcactgattgttggcaaataactcccgatggccatgaaaataaaggcaatcaaactaacggcaatacgccaaatatccaattgatggcctaagttataactgatagttgtcgcatagatcacacttgatagtacaggcacgatccaaatgatcatctgttcaaaccgtggcgccggtgccttatgattggcattcaaccgtgtcaccccaacgcaaatcagctgaaacgccatcatcataattggaaagccaacgaccactaataattttgtggccattccattaggttgattatccaaattaaaatgaatagccattttggcgggcaaggccgcataattcacgacgccgtagctcattggtaacagaataacaatatagctcagccacaactgcaagttcctttttgtcatcacttttcatccccctgctttggactaaaacgatatagccacgtcaacatttcctcaaatacgctcgcatttagctcatagtacacataatttttttccttggtcacggtaactaaaccagcttgcttcaaaagcttgagatgataagacaccgttgcattgcttaacttgaaatgagccgcaatctcaccagccgattgccgattctggcgtaaatcttccaaaatctggcgtctgacaggatctgcaattgctttaaaggtcgtattcaacgccatacgggctacctccaatcaactatttagatatatatctaaatagagtataacaggcaaccaggaattcaacaagagatatttagataaaattcgaaataggtgttttcaatcacgacaccgtgtattgactataatcctttatataaaataaaaggctaacactggacaactcgattgttgcactgttagcctctgttaaatttaatcaatactgaacaaataagcaacagcaccatatgctggtaaaacaacactgttagtctcttctgcaatgttttgatcattactaatgatcttctcacatggtctattctgcagttctgttggcaaaacaattttttttggtttttcggtaaaattcccggcgactaatagtatctgcttctgatctcgtcttaagtatgaaaatacttgttcattgtcgggatcaagcaactcaaagtcacccattgtcacaatcgataaagaatgacgcaacttgatcagttgctgataataatagaaaattgagtctttatcctttaacgcttgttccacattaattctagtatagttaggattgacgctaagccatggcgttcccgttgtaaaaccggcattatgtttgctggtccactgcatcggggtccgcgcattatcccgtgacttcaaataaatggccttcattgtgtactctttgctgagatgtttatgattaataaagtcttgatagatattatgtgtttcaatatcttgatagtcatcaattgaggtgaacttggcatttgtcattcctagttcttcaccttgataaataaacggtgttccttgttgaaaatgtaacacagtcgccaacagcttcgcagatttaactcggtactcagtatcatcgacaccaaaccgagttaccggacgtgcttgatcatgattgctccaatacaagctattccagccatgatgttcagccatgcctaattgccacttattaaacacttgttttagtgcggataatttgaagcgtctcgtagaaaacttaccattttcatcataatctaaatgcatatggtcaaagtggaaaaccatgtttaattctttacgtcgttcatccgtatatttttcagcctcagcaacattagtatggggtgtctcgccaacagtcataatgtcataatgacttaatacttgctgattcatctcacgtaaataatcatggattttaggcccattggctgcaccataataataactgccatacgctttattttgaatgaccggaccatccggataagttggttttttcgacaacagactgatgacatccatccgaaaaccatcaacgcctttgttcaaccaaaaacgcataatttcatatacatcctgacgtactttaaggttttcccaatttaaatcaggctgttgctttgcaaacaaatgtaaatagtattgaccgagttgatcaacatattcccaagctgagccgccaaatgaggaaccccagttgttaggcaactgttctttactcccatctttccaaatgtaataatcatgatattgattgcttgtactttgcttagccgccttgaaccacggatgttcacttgatgtgtgattgacgactaaatccaaaattaatcgcatatgtcgctgatgtactgcatctagtaatgcagtgaagtccgctaacgtcccgaactgatggtcaatttctcggtaattgctaatatcataaccattatcaacttgtggagattgatagataggattcagccaaataacgtccacaccaagttgcttcaaataatctaacttttcaatgatacctcttatatcgccaattccatcgccattactgtcattaaagcttttcggatagatttgataaacaacactcttccgccaccactctgttttattcatcatcatcatccatttctatactcatttgattaactgaaacaattgattcttgagcctgggtgattaaatcgcaaacccgctgatctgttaactcgtgatcagtcggttctagtgcaattgccaacgctaacggaagattcatgccactaataatttgtgtgtgggggcgcattcgataattaaaaaattgctgatttacactgcccgccagcatatctgtcaaaataacgatctccacttctgcaggaatactagccattaatgatttaacttgttgttctactggctggttatccatgtatgccgttaaagcaacaatatcagctgcattattagaaataaaattaacggtgtcagccagcccactagcaaattgatgatgtgatgctaaaataattttacgtttcataattcacaactctcccctatgccttaaagatgcctaaaaatgttcctaccagtgatattgcaataactagtaagattatttttgttggtgtccatttcttattgcctaacaaatgataaattaataaagtcagtaatgccggcaacaatgcaggcatgattttatcaaaaattccggtttgaagattaagcgttactttacctaccgcaaatttaacaggcattgaaattttaaccaccgttgcaaccagagcgccaacaacacttagtccgacaattgaggcagattctgtaaaaatatttagtcgttcacccaatgacgtaataagcttcgtaccactggtaaagccaatatcaaacattttaagtttcacaaaccaaaaaacaatgtttgcaatcaaccaaacgattgcacctaatgggtttccttgtaaggccatataccctgaaatcgatcccataattgtcggccacaatacccagacaagcgtatcaccaacaccagccatcggtcccattaaacttgtcttcaatgattgaactgctgtcttagccttaataccatcacgctcttccatggctaatgaagcgcccaaaatcagcgaagacattacagttgtcgaattataataattaaaatgattttctaatgcttcttgatactcatcgtcatcatcataaatttttcgtaaggctggtgccagtgcccaagccaccgcaggtcccatttgggattcataattaaagatattgcaagccataaaattatagcgtaccgcggcccgccgacgatcttttttcgtaatcttagttgttggttgcttattcatcataatcgtccccttcatcttcaaccacaccggcatttgttgctacttgactgacctttttggactcgcttaagaagtaccaataagctgcagcaaatccaattaaggcaacacccaagacatcaatcttcaaatatgccgctagcacaaagccaacaataatgtaactaaggaactttttgactggcatataccgtaatagcatgccaactccgactacaggtaacataccgccagcaacagttagtccgtttgtaacccaactaggcacaacgttcaaaataaatttgacaacatcggcgccccagaaaacaattagaattgcaggtaaggcagtttgcaaactgaacaaggccggaccccaccaggcttcacgacgcattttctgaaaatcatgcttttgaacatcacctaacatcttatgcgctaagaaattgacgatgatccgtgcaatgacttctaactggattgctaataatccaactggtaacccaacagcaatcgctgacttaatcccagatccagttcgtacagcaataaaaataccgacaattgttgccaatccgtaattaggcgcagacgcaccacctaaagcggcgacacctaacatcattaattgaaatgtcccagcaatagttaacgcagtgggtaaatctcccataatcaaaccagtaatcgttccgacaattaccgggaaccaagacataatcacaagaccgttctgatcaatcgtcatataccctgctaacaaaacaataagaatatcttgtaatatttgaatacctgacattattagttcctcctcgtctacgctttaaaaggttcttctggatcagttggcacgtactggattaccaaagggacatttttctgttccaatatttgcaaatcacgacgttcctcatcatctaaggcaacaaacttcgtaactggtttgcgaccgctttcattaaatagaataccaagatcaactttaggaatttcgacgccaccttcaataagcttaatcaatgtagcgggttcttttactaaaacaaatacccgttgattatcatacttaccagcgttgaagttagtaatagctttttccgtattgataatagacatcccagttccggctggcttagacatccgcatacttgctttaatggcctcgttagtacttaattcatcatcaaccaccataaaccgtttaacttgtaatgcttgtgcccattgattaacaattaatccatgaatcaaacgttggtctacccgtgctaaaattactgacataattaattcctccatttttggtatcgataccaaattatttattttaaaaagagcattaggctgatgctctcttaataacctttagctcaaatactgtttcagtagacgtttctgtgccactgatctgttttaacatgacttcggcagctgcttgtcccattcttttaaccggttgttgtacagttgataacgggatttttagattcgcagacattggctggtcgtccacgcccaatactccaatggcactaggaacattaattttgcatcgttctgcctcttgaacaacacccatggcaacttcatcgctccccgcaatcaacacatcgggtcgtacattcagtgtcaatatttgttgtaatattttacgaccatcttcaaaagtatgagcgccagtgaataaccactgccgattgaaacgtaattgatgctcatttaatgaatcttgaaaacctgcaaaccggtccgaatcaaaatcctctccacgttctgtaatcacgatattcttacggccagtagcataggcaattttacgatacccttgatcatataaaaaactggttgccatataaaaacccttatattgattcgaacgaataacggggacatctttttcttttagatactcattaactaggacaatctttccatatttttgatatgctccaataactgcccatgagttttcaattgagcaaagaatcacaccatcaacttgttgatttttcaataaatttaatgctgtcacctcttcttctggtcgaccaaaagtctgaacaatcagcgtactataaccttgctcatctaaaacccgttcaatagcatctaccaaatatgcaaagaacggattcacgattcgtggaattgtaaccgcaattgtattcgttttagacccgcgcagttgccgagcggccggccgtggaacgtaacccaattcggtcattgctgctttaacaagatttctctttttacttgatacgtgtggactgttattgataacccgtgaaactgttgagactgacaaacccgctaactttgcgacgtctgaaatcgttgccatttacgccctccttaatagaactactttcttcattcatcataatacaagcttatattttgattgtcaacattttttggtatcgttttcatattttctgttgtatttatttaaacgtaaattttatctaagaatgtccaaatgcgttttccagggataaaaaatgagcttaacaagattaccttgtcaagctcattttttcggtataattccgtatgattacagcttaaatcaatcgcaacttaatcttcatttttaaacaatgcatccaacaactgccccgccactggttgggcagtaccaaacattgggaacaagtgcggatacaagtacggcgccgcatgaatacccaagtataccgccatttcaggatgctctggcactaattcggcatagagattgggaatcatcacgtcgaccccagcgaccgctaagtgtaagtctgctaccaacttttccaccgcctgcacataggattgatgcatatcagccgtcgcgtctagcacgtccgccccgttaccaaaagtcgcatcctctcgtaataagatctgagttccccggctgaccacagaatctaaggtcaagtgatatgagtccaggcgataccgttcgatcgttcctaactgtagcgctgattgaggccacttaaaagcggtcccgcgcaacgctcgaccatttttgcgatcaagtaacgtcttgaccgttgagcgaccatcaccaacaatattggctggaattcgttcgacgattgcttgcacacgaccatcgataaccaaaaagcgataacttgatgcgactaccacttcctcggccattaccgcggacgtttgctcgaatagttgccggacgacttgttcaaacagtccgcgttcgggcataatccgaaagacaattactttgtgcgactcatccgccgcttttaatacgatcccaccagcttgaacgtatcgatcataatcagcaatcaactgattagctgtatgatatgtctgtgaagccggcaccggaaccccgtgctcagccagaatttgtttggccgctgctttatgtgtcagtacggtcgttagcgcctgtggatttaaatccgttccgctcccattcacaactaattgcgaccgtcctaacttagtcaatcgtaaaatgttagcgtgtgggtcaacaacgtccacctgcactccccgcgtcaaggcctgctgggctagttgctggctcgatagatctagcgcggtaaagcccgcaagttcaaacggacgttcattgctcgattcctgatagcgtgcagcccgttcgagtgcccatgctaacggatcggcttgcatggcaatctgcgcactcagcgtcttctttggatcagtgacccgcgacttcaactgtttgagtaacacggcatcttcatttggtaggccataggttttaacaaaatcagcaagtgcatctaaaacttgaacagccggcacggcctgagcactagccgtcgttggattttcacccaaaacttgacgggtcaattggtcagcttgagcgttgacttgggataccatcttagctggaagtgccggcatcattacgaaataactcgccaacaaacgaacaaatgccaccgcgttcgcgtccaccccgactggactagttggatcgagatccaagccccggtattcaagataatagaccccctgccgggccatcatagctagctgcccattactccgaagccgaactggcccgtcaaaatcattgaccgacaacaactgctgttgacgaacagccgccgtcaacttggccacgtagcgatcaattgacgtatagtctcccgtcacttgactgtagcgaccatcgggatgttgaacactactgcgctgtggacgactcgtagtatccgtaacggctaggcgtggtgaagcgccaaataaatactgaatcagccagttcatgcgcaccaatccctgagcgactttcagataaattgcattgcgaaagtcaacataactgtgatactgctgatggaaagtctcagtatataaacgggtgaataaagcttcattcaagctcatattcacgtgactaccagtcgtcattaatcgctgtaactcatacttacgagctaagtcgcgacgacgctgatagctgacttgatcaacatcagccagtggcacgttcgttagatcatccggcaacacaggcgtactcgacagtggccaaagtcgttcgtccgcatcgagtgaccgccgtgctgcggtattcaagcccttcagatacgccatcaatgcaggaatgtcacgacgcaccggcgtagtaaactttaaagcacttgcggaaaagcccggacgtaactgatgattttgttgcgctgatccaaacgcttgcgggtgtgctgtcgtcgctaagtgaccatggtcgtccacccggtgcatggtgacctctagtcctaaattagcctgatgaacgagtgggactaagtgatactgtacaattgccttaccaacggcatctaattccataatgatcaatcctttataattattttgttcgttaaactgattattcggtgtccttcattgtaaatgctataatagttgggactagttttgcaaggagggatttcaaacgatgcaacaaccattagcctaccggatgcgaccaaaaacgctgaaagacgttgtcggccagcaacaattggtcggcccaggcaagatcatcgcccggatggtcaaagccaaacgactatcatcaatgattctatacggcccaccaggtactggcaagactagtatcgcgagtgccattgccggttccaccaagtatgcttttcgcatgctgaatgcagctaccgacagtaaaaaacaacttcaaatcgtagccgaagaagccaaaatgagcgggacggtcattcttctgctggatgaaatccaccggttggataaaactaaacaagactttttattgcctcacttagaaagtggccgcatcattttgattggtgctacgaccgaaaatccatatattagcattaatccagccatccgtagtcgaacgcagatctttcaagttttcccgctcactgacgatgatattcagcacgcggtggaacgagccctcgctgacgaaaaaaacggtcttggcagttaccacgttgatttagcacccgcggccatgcaccacctgtgcaccgctaccaacggtgatttgcgcagtgccctcaatgggttagaattggccgtattatcatcgtctccggccgatgacggcaccatcgccatttcacaacaaacgattgaagaatgcttgcaaaagaaagccttatccgcagataaagatggtgacgcccactacgacgtgatctcggcctttcaaaagtccatacgcggttccgacgtaaacgctgcattacactacttagcccggctagttgaggcgggggatttaaagagtattatgcgtcggctgatggtgattgcctatgaggatattggattagctaatccagccgcgtgtgcccacaccgtcgcagctgttcaagctgccgatcaattgggatttcctgaagcacggattccgctagctgacgctgtgattgaattagccttatcgccaaagtcaaattcagggatcagtgccattgatgccgcgctcacaacggtccgtgacggtcatttcggtgatatcccggccgacatcaaggatgcgcattatcaaggcgctgccaaactcggtcatggtgttggatacgattttccacacgatcacccgggtgattgggtcgctcaacagtatttaccagatgccatcaaatcagccaagtattacgagcccaaaacaaatggccgctacgaaacagcccttgcgcaacaatacgaaaaattattaaaggctaacgagagaaatcgctaacaataccttggttgtgctaataattgcaacttttatttttatatgctagactaagagtcgaaattactaaggtgtgcgcattgctctaaacaaagtgttgccgaacaattaatactactttgggatgtccgttagctaattccataacatgccttatcctttggtagttagcgaattagtcagaacgtcccacctgccttaaagcgggtcaatactgaagggcgattaacggcaccactagtttttccggaagtttacttccgttggtcaggacttgttcctggcctttttttgtggcgtgaaagcgacccaagttcacaacgtcattttactaacaccgtccaaaactcatggggagaatggttaattgggaagccggttatacatgaataatctcggctattgaaatacagtccatcacgctggtttgggtatttctgcaacaatccgacactcctgaacaattactcatcctcataaaaccagcatgacgtgtgtcgcaatcatttgacgctaaattgtgttgtgtgaactactagtactaatcgcttatctttagctagcattgcatttgtcttctcttccggaatcaactaaaataagattaacatcacctgttggaggttcattttgattacattactgcttgtcatatacacgctcattgcgggttggctcagttattatctgctgacgcaccagtcccgaccatttctcttttttgacccgaacaaagcgccgacaatcaaacacgtcgcacgctatggtggcggcttaatgttactagttaccatcgcctgtttcgtgaccatctttgttcaagcgacaatgctaattgccattgtactggctagcggttcactgattatgatggcaattgcactaattttagtgagtttcatgcaaatctcatagaaaacgctttttattttttgcgaaaacctttacaatatagttataaagtaatgaggggtgagaatgatgttacaacaataccaacacattttagttcctgttgatggttcttatgaagcggaattagcatttaaaaaggcggttgccgtcgcgaaacggaacggacctaacgcctcagttcacatggtccacgtggttgatacccgtgctttccaaaacatttctagttttgatacgaccatggttgaacaagtgaccgatactgctcaaaaaacgttggacaagtacgttgcagaagctaaggcggacggcttagataacgtggattattcgattgaatatggcgcacctaagacgattattgcgcgcgacgttcctaaggatatgggcatcgatttaattatgattggcgcaactggtctcaacgcggttgaacgcttattgatcgggtcagtcaccgaatatgtcactcggatggctgtttgtgacgttctcgttgtccggactgacttggaaaataagccagctcctaaaccaaagaaaaagtaatcttttgatacacgtacaataaaaatcggctcagtgaagttacttacctcactggccgattttttactatttgccaaaatcataccgcttactgctctaaaattgcccggtaaagcgcctgaccaagatcattcatcgcgaccgtttgcgcggtacgttccccactagcagtcatcatcgtcatgataaaagttccctgacgattctgaacgatggccgcatcattttgaacaccgtatgcttgatagtccccagttttgttatagattgtcgcgcgtgttggcagatttttgaccaacttactgtgatccgtgttcgccttcaaaatcgttaacatcgcgtgatcggctttgttcgagatcaaacgcaggttcgccagtcgtttcagcaccgttgccacatcccgaaccgaagtatcgttatcatgcccggcctttagtgcggcagtatccattaaccgccgagccatttttgtatcagtcagacccaactgtgcaatttccgtgttgaccgccgagaagccgccaacacgatccaacatgatattagcagccgtattatcactctccgtaatcatgcgtttcgtgatttcagcatacgtcaactggcttccagctggtaacgtgtgcaacgtcccggttccaccaactttatcggcagcacgcagggtataacgatcctgcatgcgccaattattttgatggacctgatcaaaggcagtgaccataataaataacgtgatcaaactgccagcacgttgcgctcgattattcaaaaccacggtctggctacccgttaatggcatcaccgctaccgaagtttgaccagccaacccattcgttgcttgcgcaaccagatcagtaactgtcgtagtcggaaatgtctgtgttgccttcatcagtgcgtcagaatcgctggcagccggcttatgcacctggcttttacctgccgactcggcagttgccgatgtcgtagacgaccacaatagttgtcccacgatatagccgccacccagcaatagtaaccccgcaattaataccccaaggagtgtttgtggcctaaagcgactcgaaaaagttgtccgccgtgattgttgacgccgccgctggactcggctttgctgattgacatcaccattcactggcgttagacgatgaccacattttaggcaagtcacggcatgcggtgaattttggtaaccacagttttgacaactcatcttcacattccccccggtattaaaaataggacagtcagcggtgtgccgtgcctaatgggaaccgcaatatctcccattaagcgcggccgttcaccgctaactgtcctatcacgttatctaagcgtcgttagccacttgcaagggtgcaatatggtactcggccatttctttcgtgattttttcggtcaaactactgttatgtgtcaccagacttaacgcatacgccacgtaatagtgatcatgcgctgactggacattatttaaaacaacttcattggccgccttttgtgcatacaaacggtctaataaataaagtgactgactctcctgagccttcttgagtgccaagtcgatcaactccaaagcttcctctggaaaattgatcttagcatacaattgtgcggctgaggcgtaaatcaaaatttcattttgtaagtaatcgtcgtcacccatcggcattgcttgcgcatccattgtgtgtaaggtagcaactgcctgtttgacaaaaatttcagccttgtcataggcctgcttacgttcataagctaagccggttccaagtgtggccaggatggcaaacatatcgtgactagacttgacgaactgattaagcaacatcccaaagttaaagatggcttcgtcagcattgtcattgagcactaattgaagatagccctcatagtaataatactgtttcttatccgtattactacgtaactgcttcggacggatatgctggaacacatcctgagcctcttccagttgtgtatgtcgaatcaaagtatcaatttttttgaaggtccgatataactggtcgtcattttcaataatgacttccgataaacgaattcctaatcgattacaaattttcatcataatcttcatacttggaattttactttttttctcgattagactaatcgttgcctgagtacaaatcccatcagccagttccttctgcgacatgcccttccgctttctgaactgccgcactttttctcctaatattctcatgcttaacccctcttcattgattgccttaaaccaaactcattttgtaactccccttgctgcccccactaaatgaacaagggtatcgtgacacctaatcaatcctcgttaatccgttcgaataattgagcactaaccaattggacaataccaattacgcatataattatattcacataacggaattttagcaagaaatacgcgtaattcttatttaatattaagtttataccatgatatcggccgaaggtcatttattaattatccaggcttacagttcgttaaccaccctaatcaaggacttgttcattaaaagtgagaactactgaaagcgatttaaaggggagcaaattaaccttattaacagcaaacatcaattgtcatgacaccctcaattaatcggttgacgtggcttaataattaagattagttctcatacttctttcagtagtttataaccaactaactaaccaatttatcaattgataaaaataataatgcttagattgaccctgtaatcttcgtagttggcccggtcgatttgtgatcagcccgtcagcccccatggccgtcagtcgctgcattgcaagcggccgatcaacagtccagaagtagacgatccgatgttggcggtgggccgcactgatctgctcacgggtcgcggtcagtgcttgtaaagaataaaatcccgcgacggaattagaaaaatccgtcagataaaacggcgttatgaagccaaccggtagttgcgccgcccgttgatgtaatcgttcaatcacacgatagtccaaagagtgtaccgcccctttttgttgtatcagtcgttgtgcatagttgtcggcaaaaatccccattagttgatcagccgtcccaactgacttgatttcgactaataaaggttgctgtaatttgtgtgccaccgcaaagtactgcttaaacgtactcaagtagcctttttgaccatgctcccgtagtggtaatccactcaacttatcaacggggtactcatgaacgggaccgggttgacccgctaaagctttcagcgttggatcatgcatgacgacccagtggcgatccgctgtcggctggatatccatttcgaccatatcaggctgaacttgctttacagtccttttaagcgccgctgtggtattttggacaccgtcacgaccattaacaccccgatgtgcaataattgctagcggcgccgttggtggcgttcctagccaccagcctgcgtaaccacccaagactagcaaaccggtcaacgtaagtagcccagtttgccagttagagtgaccggcgattgctgtttctggccaaaggcacgaccaccatcccataaacattaaccaagccagcagttgcaacccagtcatcatgaaaactgcaataaattgactgaccagctggctaacagcgccactagcccacactatgccaccactaatgattgccataacgagccagctaatcaggaacagccacacatttcgactttttttaaagactgtccaccaggaaatccgccaacccgttcgccaataattacgccagctggtcggagcggtcaattggcgttggagtgctggtaaccacttccagctaatcagccagcccaacagccaaagtggtcccgccacaggaagccagtcataacgcgtattaaagattatattttgaacagtcgctggcaattgtatgctcgcttgtaaagttgctaaatagcctaaccaaccgagtggtaaccaccacaccgccgtaaacattaacagcacccagcgatacaaaaattgaccggcctgccacgactcatgattactacgagcgaccatggctggtaaccaggcactcaaaagcaacaagcctagcaagctgactaccccaccgaccagaatcccgagcaccttagcgagtaccgccagcaatatgccggccaaccaccagcaggctagcggtccagccagttggcgcgctccctgcatcactaagtgccatccgcgacttaacaacctgacccctcctcacaaaaaaaggcggccgtgatgaatcgcttcatcccaaccaccacaaaactcattactatcttattccgcgtctaacgcaacgaaatcatagtgaatatcagattgacgtttgaattcatcaaaaccaagttggatcaattgatcgatcaacgccgtataactaatgcccgaaacttcccatagctttggatataaactaatgttagtaaaaccaggtaacgtattgatttcacccaagtatggttcaccatcttcagacactaagaaatcgacgcgtgccattccttttagaccaagcgctttaaacgcgtctagcgacatctgttgaatccgtttcgtcaaatcagctggtaattcgactggtaattcgaacgtcacaccacttgcatccacgaacttattattatagtcgtagaacgtgtccgtcttcggcacatcaatggcaccaagcttagatgccttaggattttcattgcctaagatcgagcattccacttcacgcggattgtcaatcgattcttcaactaaaatcttgtagtcatatttgaacgcatcggccaaaccatccaagtattcttgttcattctcagctttatgaatcccaatcgacgatccttgattggctggcttaatgaataaatgatcacccacgtgggcttgtaaataagcgtacgtcatttggtcccggttttccggtgtaaccaccacgtacttggtgttttgaatatgatgatgcgttaaaatctgcttcgtaatatccttatcaaaactagctgccgacgctaagacaccactaccaacatacggctttttcaataacttgaacagcccttgtaaagtaccatcttcccctaagttaccatgaaccactggatagaagatatcaatatctttggccagtgtcaggttcttgatgggagctaatggatcactcatgtccaactttggcatttcttcggcgacgacttgatcttctggttcaccatcaaatacgcgccgagttgcagcatcactcaagacaatcccgttcttcgtgattaaaaacaagtcaatctcgtacttattcttgtccatggcatcataaatgttgtgcgctgaacgcttcgaaacatcatgttctgaagagttaccaccaaacaacataccaacatggatctttttttgtgtctccataattttgttcatcctatcaaggtttatttcatactacggcttagttaattctacaatatctgagcacaattgaaaacatttttacaataaaacgttgttttttacgcgtcaaatggcgcagtcaagacaatcttacccaacatttgccccgtctctacgattgtgtgcgcagttcgcaaatttgctgcattaattccagctaaagtccgcttggtcgtcggtacaatcaccccggcatcggccagttgcgctacctgtgccagaatactcccctgcgtcgccatcgatggcaactgatagttagccttcgtaaacataaactcccaagcaaaattcaaacttttcggctttagtaacgccattggcaaggggtgctgatttgtcactacggcgacgattgtgccaagtggccggactagcggtgtcactaatggcaagtattgatccgtagagtgtaatagtatcgcatgatcgacagcctgcaaaccggccgcagctaattgcgatcccagatcctgatggtaatctaagacgatatcagcacctaaccgcttaacccattcagtggtttctggcttaccagtcgtcgtaataacttgaagacccgcccactttgccaactggatggccatcgagccaaccccaccagcaccattgatgataaggacgctctgaccaagattcgcgtcagccgctgcagtgaatggtaatttttcaaacaatgcttcccaagctgtcagtgtcgttagcggcagaccagctgactgcgccggcgaccacgttttcggggcacacgcaactaaccgttcatcaaccaattgatactgagcatcactccccggccgatcgacggcgccagcataataaacgacatcatctgtcataatcgttgtcactgcttcaccgaccgccaacactttagcaacggcatcaaaacctagtattcgcggcgttgtcactggcgattgaccttgccgctgcttcgtatcgattggattgactgcggttgctaagacggctactaagatatcacggccacgaggttgatttacattaatggtgacatcttgtaaactattcggatcgctcactggcaacccttgcgttaatccaactgcttttgcctgcattcaaaagacttccttccaaaactaacctaaaaattctaattcatcatccaaataatctacgacggccgttggcagatcatcgtgtaatgcaagtgcttccaataatcgattacgattgaaaatctgcgtccattcagcttcactagccggacgagtatgcatcatcaactgctgatgccagtccttcatcgcagttaacaaataatcacaataaagctcatgtttgtttgtaatcaaggtcaaataagtcgatagtcgttctggctcgccaaaaatcaacggcgttgttaacttttgataacgagcaatcaatgcggccaacagtaataatttatccgcacgtgcgagttgagactcatctgccagttcatctaagatattgccaatatgcgtgtacgcatgcgcccaaccggtggtgcccacaaacccccgagtatccttttcgagtaaaatgtagactgtcatttgctcaacaactagatccagccgcgcgggtgtcataaacttgagacccgcatggtccgcatacaagagcactgacagtaatagtatcgcaaatgaccgctgataaatggcatcattttgcggctcatcgatgtgtgcaaataacatctgatcttgaatcaactgatcaaaaatatcgcccaactgttccggtgtgagtacctgctgctgtaatgcctcgtttaacaaatagtagacgccttgatcacgaaccagcggattcagcgaaccaacgtgtgccatcaataatttgatttgatcgtcgctcatcgcggtcaacgtgcctttcttcaactgctcatgaagtgttgcaatcagtggaagcacctcttcgtcgctcggaatcgttaccgtggtcgtcacggtactcggtaactgcttaatcagcgttgccattcgactgggcagtgactgatagatttgtcccgatcgaagttgttgtcttaactttaacactgcatccttaacctgcatcaatttctctgcttgcataatgacctcgtaatctcgaatttaccttctattttagcatgtcagcgcctgtctgcccaaaagaaccattcaatcataaaacgtgacctaattatagacgtcacgaagccaacctgagccaatacccaagtccacaccgcacaccctgattaggccacgtttaatgacaagatgtttcaatccatgcttagaaaaagcttatgcttgcggtaaaacgtccacttgcgacttgataaacttcgctgacgctgctaacgacgctcgttcatcagtggtcagatctagttgaattaatgattcaatcccgtttttaccaatcacagcaggcatgccaacgtatgtcccatattgcggatcaaaagctgaaactgggcaagccagttgtgcatccgcgctgacagcttctgccaatcggacaccacaagtagcaatcgcaaagtttgtataatgcttacccgccatgactgcaaatgccccttgccttgcatcttcttcaagttgatcaaggttcagacctgggaaatttttgataggctgcccattgacgctaaccgttgaccaagctacaaattgtgagttgccgtgttcgccatatacgtaccccgcaacatttttaccattcgtaccagctgcttgtccgacatacttttgcatccgcgccgtatctaagaaggtccccgtaccaaaaacccgttgccgtggaaaacctgtcattcgttgtaaataatccgtcatgacgtcacacggattcataatatcgatcaaaatacccttgaagccagatgccacaatcttgggcgcaatctcccgtacaatcgcttggtttaaatcatactcaccaaagcgacccttggaactattcatatcaatggcaccaatattgccagaagccacgatcaacacttcggcatcggccaaagctgaataatcgtttaaaataatcttagtggttgagcttagacgaggtgacgcgtcgtctaaatcgagtttttgcgccttggccaaggcctcattcttatcgattaaaactaattcatcaacggttccttgttgaaccaacgtataagccactgtcgcaccgacttggcctaacccgatcacaccatatttacgcatgctgcaaaccccaatctgtagtttatttaacttggttagcgtaccttgcaaccgctataaagtcaagcaggacgctgtctcataagaatttaatcaatagtactacttagataatatcaaacgtgcattttcattaacccgcttcggaaagttaccgtagtcaaactccgtgaaaaaagctagcctcagagaatccctgaagctagctcaatcaatcaatattctgatttaagatggtccgtttagtcggccgaaactggcaggatggcacccttgtacttcttttcaatccatttctgggtgctcttagaacgtaaaactttcattagtttcttaatagctggcttgttcttatcacccttacgaacagccacaatgttggcatatggtgaatctgatttttcaagtgcaatcgcatccttcttaggattcaacccagcttgaaccgcgtagttcgcgttaataacgaccgcgtcaccctcgttatttttgtagaatgttggcattaacttagcttcgtatgaatgtttaaacttcaaatgacgtttgttggtcttaatgtcattaaaagttgctgaagttaaatctgtcccttttttcaaagtaattaaacccgcatccttaaataacgtcaggacccgaccatagtcagccacgttgctgctgaccagaacggttgcgccgtctttcaagtcttttagactcttaactttcttggaataaacaccgattggttccaagtgaaccttccccgctgatacgaggctcccattattttccttattccagttatccaagaatgggatgtgttggaagtagttggcatctaattctttcgaagccaatgccttattaggtaagacgtaatcttgaaagactttgatcttcaagttaacgccttcctttttcaattctggctgcacgtgcttcaagatttgtgcgtgtggcactgaagaagcccctacagtaatggttgttgtctttgttgacgatgacttcccacaaccgactaacaaaattgccgttgccgcaactgctaataatcctagaattcccttttttttcataattccgtttcctcctatacgaactttaattaacccgtttatcaatatgccgaactgcaatatccccgataaattggaagataaacacgataatcacaatgattaccgtcgccactaatgtgatggcgttgttattggactgaaacccgtcttggtaggccaaattacccagaccaccagcaccaatggctcctgccatcgcggtgtagccaattaatgaaatcgtcgtgaccgtgattccagaaactaatgccggcatgctttctggcaataggacttttcgaataatctgccaccgggtcgcccccattgattcagcggcctcaatcactccatgatccaattcatggaaggccaattcaaccatccgcgcatagaatggcgcagcagaaataatcagtgatggtaaggccgcgcgcggtccgataatcgttccaactaacttagacgttaccggcaataatagcacgatcaaaataatgaaaggaatcgaccggaaaacgttgacgaacagcgcaacaatccaattcaaggccttagccagcggattctgactccccgccgtctcataaagtaacagacctaaggcgattccgagaatggcaactacgaccatcgacacaatcgtcaaccaaattgtttcccacgtggccgacatcatgctaccccaatcgacatttgcaaatttaaaatatgaatctaatccttgatcattcacggttcaagacctccgtttccacccgcatcgtttgtaggtacgctagagcgcccttaatctgttcctgatcacccgttagttgtaagtacagcgaaccaatcgccccttcttgggtttggtgaatcccaccctcaataatatttaaatctaacggatacttcttcaacatctctgaaacaatcggtagctgggcttgatcgccatggaacgtcagttgtacgatggttccctttggatatttcgccagcagctggtccacgaccaccgttgtgtcattcagcgacggcgtgacctcttcattaacaaaccgcttagtcacagcctgctgtggtcgcttgaagacttcaagtactggtccttgttcgacgattttaccagcttccatcaccgcgacatgatcagcaatcttgcgaatcacgtgcatctcatgcgtaatcaatacgatcgtcaaatggagcttctggttgatcgataacaacagatccaacacttcatcagttgtctgcgggtctagggcactagtggcttcatcagaaagtaaaatctgaggatcattcgcaagtgcccgggcaatcccgacccgttgcttctgaccacctgataattctgacggataagccgtttcccgaccggccaacccaaccaagtctgccaagtgttcggctttcttacgggcatccaccttggacagaccagcaatttcaagtggaaacataatgttctccaaaacggtccgcgaccataatagattaaaatgttgaaaaatcatgccgatcttttgacgttgggcgcgtaacttggccccgctcaacgttgtaatattgacatcatcaatcacaactgacccactagtgggtgtctctaagccattcagcatccgtaccagagtacttttaccagcacccgaatagccaacaatgccataaatgtgaccatcttcgatttttaaattaacatcttgaacggcgtgaaccgccccttgcttagcatcaaaggttttcgtcacatctttaaattcaatcaagtcaattcctccttacgcatcaaaaaaagctcctcatcccagacaattatgacaataatcatcaataggacgagaagcttagcctcgtggtaccacccatcttcacaactagctcacgccagttgtctcaagagttactttgaactccgcatgataatgggtgcgacccaagcttagcttgcgactgctcactaaacttcattacttcaagaccatcttcagcttcacgattaatcccctttcaccaatcaggaactctctaagtaatcataaccgcgtactcatcttttcaaaatgataacttttttaatcaattgttaatgtaacgagtataccgagcctgtttctaattgtcaaggcctggcaattagtccacgtcgattaaccaagcaacgccgtcttcaacgctatttaacgcatcgaagttctcactcaacgccgggttgaccgcaaccacggtcccattgattggacagttgaattcagaaacggctttggtcgcttcaacgctcagaaaagcgctgttctgactgaccttgtcaccgatagctggtaactcagcatatttcacttcaccaagagcctcatgggcggccttagttaaacctaaccgcgtatgtccatcaacgtcttttgtccaaaaataagctgcatcttcactcatactaaacaccatacctttacaataattttactattcaaaccggtcgttacgactgaacatgtaggacttgtaatgatatcgcatcgacatcattaaacctatcccagccatattggcaatcaacgccgaacccccttgactaataaacggcaagggaatcccagtcattggtaacagtccgatactcatcccaatattttcgaacacgtggaagagaatcatcataatgaccccggttgaaatgtaagcgtagaattcgttcttcgtatcaaacgtcactcggatcatctggtaaatcaataagaaatacaataaaatgaccacggcacaaccgataaagccaaagttttcaccaattaccgagaaaatcatatcagattcacgcacaggaacagtcacgtgggaaacgttaaatccccgcccagtaatctgacctgaaccaatcgctttcatactctgccaaacttgataagcattgttagacgtgtccgtcgacggattcaaccacgtatcgatccgcgcaaattggtattgcttaaaaccgatagcttccaaaatatggcgaccactctgcgagatcacgagatataacgcagtccccgcaatcgccgccacaatggcaaacgtcggtgccaataatcgccacgaaatcccagaaactaagataacgcccccaagaatcgcgaagaacaccagcatcgtcccaaagtcattctgtaacttcaaaaggatagcaactggcaccatgtacgcaattaacttcccaatgagttgccaatcgctcgccatcgtatgtgttgggtgctccgtgttatgcattgtcacgactcgtccaagcatcaagatgaaggcgggcttcatgacttcagacggttgcaacgtcaaggaaccaactgcgaaccaacttttagccccagtgctcgcaaacagtgatctactgtacaagaccaaaacggccgcaagcaggaagatcccaaaccaataggcaatcggtgccactcgccataactgttccgaatcaaattgcatcacaattacggcaatcgcggtcccaatcacgaaccacatgacttgagaaatcacctgcttcgtgacgtttactgaactagagtcgtgcactgcggcgacataaatcgacgccagcccgatcaatcctagcatcatcactgaaaatatgataccccagtcaattcttgaatcctcgtcttgactgcggagtctagattcttctgccacaaataacgctcctaacctgttgggattagcccaccgcacgcgtcagactaaccctattcacaatatcattttgtactttaagatagtttttattatacaacaacctggtgccgaattctcggaaccaggttgaaggtttactaaaaattagcctttgtgtagatggtaagccgacaagatctcttgcagactctcatcaaaagatttggtatgcgcaaatggttggttgtcactaaccatttcagcttcaaatcgttcaccgacttgagtcacttgtccaatcacttgtttaccgatcaaaacttcggtaactggttgaccgttgaccttagtttcgtttaaagtgaccgaaatcgccttatcttttcttgccacggtggtcttcctccttgtattgcggattacgacgcaatgaaaaatgggctggtaccggatcaaagccgcccttaactaagggctgacaacgtaagatacgtgcaactcccattagaacgcctttaactgcgccaaaccgatcgatcgcttctaacgtgtaattagaacaggttggataatagcgacaatgagccggactaaacgcagaaaaggcccgctgataaaagcggatgcctttcattaataaccgtcgcatcgtaatttatttcttgttcttagcagttttctgcatatgttcaagtaaaatcccagccccctgagcaacgttgttcaatgggtgttcggcaaccattacgggcacctttaagttttcactgatcaattgatcgaggccactcaacagtgcgccaccaccagtcaacgtaattccacggtcaataatatcggccgcaatttctggtggtaaagtttccatcacgtgatgggccgtgctaacgatctgcatcagcgtttcgtgaatagcttcttcaacttgattggagtcaatgtcaattgagcgcggcatccccgtcacagtatctcgaccacgaacttgggtgaccttatcatcatcgccgtcctgcttgaaaacttgtgcgatttgaatcttaacttgttctgcactgcgttcaccgatcaacaagtgatgttgatctttgacgtagttcacgatgtcctgattcatccggtcgccggccattcgtaacgaactacttgccacaatgtcacctaatgataggacagcgatatcactagtcccaccaccaatatcaatgaccatgttcccacgtggttggaaaatatccatccctgcgccaatagccgccacttttggttcaacttccaagtaaaccttgttaccgccagatttttcagcagcttgcaagattgccttgcgttcaatttcagtagtgttcgttggggtacagatcatgatacttggccgcgacataatgccacggacatttaattttttaataaaataggacagcatttcttcggtgacatcaaaatccgaaattactccgtcttttaatggtcgaattgcccgaatgttactaggcgtctttccaaccatttggtaggcttcggacccgactgccaacacttgattcgtgttcgtatcgatagcgaccacggatggttcgttaaggacgatgcccttacccgatacgtaaattaaaacattggcagtacctaagtcaataccaatatctaaagccatgtttttgctcctctcaaacatacaattatacgactaatcattataccatactctacagttgatgagaactgacggctgtcctagccactcgttcatttgtcactaccaatcaattggctgtgcctaatcatcctgtcgtttcgaccactcatcgaccgtcagcgaataaattgcttcatcacgatattgaccatttaacaagatattttctggcagggtcgcatccaaatgatattggcgtcgctcagcaacagcccgacttgcctggttggcaacgtctgcacctaagatgaccttgtgcagatcaagctccgtaaaagcaatttcttctaatcgttcgagcgctttagtcatgacgccacgaccagtatatttctggcccagccagtagccaatctcaccgttgtgattaatggcactaatattatgcaagtctagcatcccagcgacttcgccatccacaatgatggtggtgataaacacctgtccatgagcctgcttggtcaacattgattcgataaaatgacgctcgtcttgcacggtcgccgtcgcatcaacccacggcatccataacttcaaatggtcgcgattatgatcaactaagtcgaaaagcggctccgcgtcagccacttcagttggtttcaatgaaatgtgtttgtcgataatattaataaacataagttgtcctcctgaatgttggcgccgggttaccccgcttcgccacaaaaaagccttcaaaaacgagtttatcgcactttgaaggttttgtaagcatttatttcgatttattccgcagcttcgttcgcaaaatcaggattcaacgcataaacggtgccatcgggaacatcaactcgtttaatctcagcacctaatttagccagcttaccatggaagttaaagtagccccgatcaagatacttcaaattagtcacttcagtgtaaccccgactgaccagtccagcgattactaacgctgcagctgcccgaagatccgtcgcagtgacctgggccccgttaaagtcagtgggaccatacataatgacggagcgcccttcaactttgaagtcggcgttcattcgccgtaactcatcaagatgcatgaagcgattctcaaaaaccgtttcagttaataaactagtgccctgcgcacacaactgcaaaattgtcatttgtggttgcatatccgttgggaaacccggatggggcatcgtcttaacggaggttggcttcaagatttctggaccaatgacccgaataccagccggttcttccgttactgtgacgcccatctcacgcatcttcgagatcaatggcttattatgttcggcaatagcatcctcaaccaagacgtttccctgagtcaccgcagcagcgaccatgaatgtcccagcttcaatccgatcctgaacgatactatggtcacagccatgcatcgctttaaccccttcaatgcggatcgtttcagtaccggccccggtaaccttagcgcccatctgattcaaatagttcgctaggtccacaatttcaggttcacgagcgacgttttccatcgtcgtgatgccatctgcaagtgttgccgccatcattatgttctgcgttgccccaacacttggaaaatctaagtaaatggccgctccgtgtaactggttcgcggttgcttcaacatagccatcgtggcgttcgatttcagcaccaagcgcgttcagtccctttaagtgtaaatcgattggtcgtgaaccaatcgcacagccacctggcatcgcgactttcgcatggcctaatcgtgctaatagtggtcccatgaccacgattgaagcacgcattttggatacgtattgaaatggtgcttcggatgataattgacgactagcgtcaatatcaattgttttattaatttcatcaaaatcaattttagtattcaaaaatttcaagacgttgttcattgtaaaaacgtctgataacactggtacatttgataaatgtgtctgaccagaactagccaacaagcttgcggctaagattggtaacacggcatttttagcgccctcaatatggacatttcctgtcaaacgttgaccgccatgaactacaatttcctccatggataaaccctccatcactaaacgataatcaacaaacaagttacgtgagatttcggattgcgtaaaaagcacacttactaaaagaacccgattggatcagatgcctcgcacctgcccaaattccactgttcaccgctgtactaagcaaatcggcaacgcgcggtgtgcaatccaaacaccagctcaaccatcaaaacaacctggacacaccatggcaacttgccaatagcagcatgcaggttcaaatcggttcctaatcatcataccatagaacactagtggataaatattacattttacattttcgttacaatttcaacacaaatattaaatacttatgattagttaactaattagaagtccgtcgtgcaattatttgacaagccatacccatattgattagcagtatcgttcgtttgtaatcgttttctttattgtaatctcactataagttgcattctaccattcaacttatcgcaatgcccctaatacgctcaatcgattagtaaaatctagttcacgaacatccgcgccgactggacaaaacatttcaacgtcgcgataaaattggccactgaaacgtttaagttcgatgtaaacttagttgttcatgttccctatgccgacctttggaaattgctgccaattgtcggaatgtgatgatcacccatttaagtcgcgatccacgtcttaattactgctctgccagatactgatgcaatgttggcgaaaaatattcgaatcagaccgattcttctagttaacaacgcgatatcgccattagtaagccagtgcttggcccttgatcaacccacggttccaatctgcttggaaccgtgcaagcttaaaactggacagtaacgagtacgactcaccgcggtaagtttgactaacttgtgcatcgcggcttaactgaaccgcacaaaaaaagcacccgcaaataattgcagatgcttttcagaattttaagttgttaatgccgagcaacattcaaacggttcatggcacgccgcaaagcgacttgggcccgcgccaactcagcatcatcgtgcttttgttgggcattttgaatccgtgtttcagcgcgtttccgtgcattttcagctcgagcaacgtcaatgtcattctgacgttcagcactatcggcaacaatcgttgccgtattattactgaactcaacaaaaccaccattaacggcaatttcgtcatcttcctgatcactttcaagttgcttgatccgaacctcatcgattgcaagcgatgcaatcacaggaatatggttcggcaaaattccgagttcgccgtcaatcgttcgcacgatcaacattggcgtcttattctcatagacctgaccgtctggagttacgatgctaacggttaatgattttgcattgtcagccatgtaaacccctcctaatcagttaccatcgatttcgctttttcgaccacgtcgtcgatcttaccaacttgacggaatgcgtcttctggtaggtcatcatatttaccttcaagaatttctttgaagcccttgatggtatcgttgattggcacatacgaaccaggttggcccgtaaagttttcggcaacgaagaagttttgtgacaagaagaattgaatccgccgtgcacgcgcaacagttgtcttttcttcgtcagataattcatccatccctaaaatcgagataatatcttgcaattcacgataacgttgcaagacccgttgaacttccgttgcaacttgataatgttcttcgcccacgattgatgggtccagagcgattgaagaagaagctaatgggtcaacggctgggtagatcccttgttccgtcaaagaacgttccaagttggtcgtcgcatccaaatgggcgaaagtcgttgcaggtgccgggtcggtataatcatcggcaggtacataaacggcttgaatcgaagtaactgaccccttcttggtagaagtgatccgttcttgtaattgacccatttcagtggctaaggttggttggtaaccaacggctgaaggaatccgaccaagtaaggcggaaacttcagaaccagcttgcgtgaaccggaagatattgtcgatgaataacaacacgtcttgaccttgaacatcacggaagtattccgcaatcgtcaaaccggtcaaggccacccgcatccgggcaccaggtggttcgttcatttgaccataaaccatggcggtattcttcaaaacgccggaagccttcatttcgaagtaaaggtcattcccttcacgcgtccgttcaccaacaccggtaaacacggaaatcccgttatgttcttgggcaatgttatgaattaattcctggattaaaacagttttaccaacaccggcaccaccgaacaacccaatcttaccaccacgaacataaggtgctaagaggtcaataactttaattccagtttccaatacttcagtactggtcgttaattcatcatatttaggcgcatcccgatgaatcgggttacgttctgcgtctggaccgaattctggaccaccatcaatggtttcccctaaaacgttgaagacccggcctaacgtctctttaccaacgggaacagtaattgaagaaccagtgtcttcaactgtcattccccggcgcaagccatccgtaccatccatcgcgacggtccgaacaaccccatcacctaattccaacgatacttccaccgttaaagtgtcatcgttgtccttctgaatgatcaaggcgttattaatatcgggtaacttatcgtttagagagaattcaacgtcaacaacgggtccaataacttgtacaactttacctgtactcattagtcgttaattcctcccacttcgttattcttgcgcaaccaaaccaccagtgatttcagtgatttcagtggtaatagcagcttgacgcgcacggttatatttcagatttaatttatcgattaaatcgccagcgttatctgatgcagccttcatcgcggttgacgacgaagcatgttcagcagtcttggcatccaagattgcaccataaaccaagctttcagcatattgtggcaacacggccgacaaaatggcttcttctgacggttccatttcatactcgggaccgacatctacccggctatccttggctttacgattatctgactcactttgttcaaaggtctcttcggagatcggtaacatcttaacggcccgaaaaccagaagagagccgattaataaagtggttgtagaagacgtaaagttcatcaaagacttcgttgtggtacattgatgtgactgtcttaacgatttcacgaacctctttaaaagttgggacatcagagacgccgcggtactcataagccacgtttaacccgttctttttatagaaatccgcaccagtgccaccaaccgccaaaacgactgcgttatcggcatcaaccttgtgcgtccgcatgaaatcgttagtctgtttcaacacgttactgttgtaactaccaacgaggccacggtccgaagtgatcaccaataaaccagtctttttaacggggcgttgcgcgagcaattcactaactgaaatcgtattcgaattactgttagcaacaccggcacttgctgacatcagatgagctttggcaagatgtgaaacgatgctttcaactttagaagcgtacacctgatacgtgctggtatgcttttgaatctggttcaattttgaagttgagaccatttgcattgccgacgtaatttgatgagtcttctttgttgagtcaattcggcgcttgacatccattaatgattctgccatgcactactcaccatccttttcagccataactacttcgcagcggcagcggttggctggaattgttctgcaaacgcatctaaggccccattcatcttatcagcttctggtaacttcttggttgccaaaatcgtatcaaagaggtcctgatgactagcatgaataaattcaaacaattcactttggtaacgggcaatatcatcaactgccactttatccaaataaccgttggtcaaagcatataaaatcattacttgttcttcgaccttcaatggtgaatgaacaggttgttttaagacttcaacgatccgttgcccacgatttaatttcgcttgggttgcagcatccaagtcagaaccgaattgtgagaaggattccaattcacgataagaagccaagtcaagacgcaaggtcccggcaacggacttcatcgctttaatttgcgcatccccaccaacccgggaaacagaggccccggcatcaatcgctggccgcacacctgaatagaatgaatcactatccaagaagatttgcccatcggtgattgaaataacgttagttggaatataagccgaaatatccccagcttgcgtttcgataattggtaaggccgtcattgaaccgccacccaattcatcgctcaacttggcagcccgttcgagtaaccgtgagtgcaagtagaagacatccccaggataagcttcacgacctggaggacgacggaggatcaaggaaagttcacggtaagccgttgcttgctttgaaaggtcatcatagacgatcaaaacgtgcttgccgttcatcataaattcttcacccatcgctgccccagcataaggagctaagtacagtaatggcgctggttcagcaggtccggcagttacaactattgtgtagtccatcgcacctaacttcttcaacgtttcaacttgggcccgtacagttgagtccttttgaccgattgcaacgtagacacaaatcatgtcttggtccttttggttcaaaatggcatcaatggcaacggacgtcttcccagtcttacggtcaccgataatcaattcacgttggccccgaccaattggaactaaggcatcaatggccttgatcccagtttgaagtggttcgctaactgattgccgttgcataataccaggagctttatgttcgattggccgcgtattcgtggtcttaatctcacctaaaccgtcaactggttgacctaatgggttaacgacccggccaatcatggcgtcaccgactggaacttccatgatgcggccagtccgcttaacagtatcgccttcacgaataccatcaaaatcccctaaaacaacgataccaacatcgttgctttcgaggttttgtaccatcccgtaaactccgttactgaattcgagtaattcaccttgtaaggcgttgtcgagtccgtgagcacgggcgatcccatcaccaacgtaggtgacagtaccggtttcagcaactgagagctcagtttgataactttctaattgttgtttgattagagcactgatttcttcagatttaatgctcataaaagtttcacctcttcgtaaactaattgttgatgagtgctcgtcttaaattcgttagttgtaacgcaacgctaccatcaaacgtttgattatttgacttcacaattacaccgccaatgattgcttcatcgactttacgtgacaaaacaacctgattggcaccaacgcgtttggcgaatgcctttgcgattgcatcagcttgctcatctgacaacttgaccgcagacgttacttcggcatgcactattttgcgactctcatcgaaacgtgcttcaaacgcgtcaacaatgccaactaagttcgacatgcggccgtaatcatacaacatttgaataaagtttttaatgtattctgaagcgtggtcagtcaaagttgacaacgttgtctgtttttgatcaaccggaagcaatgatcctgagaggacctctgccaattgcgggttgtcgacaaagacttgccgtaattgctttaactcggccaggaatgcttcggtctgatctttttcaactgcaagttcaaagagtgcctttgaataacgacttgcaattgtaagattatcaagactcatgctttcccaacccttcaatatacgaattaattaatgcctgttggccttccggatccaattgcttcttaataatcttcgtagcaatcgcaaccgaaatgtcagcgacgtctgattggacgttcttcaaggcatcttgacgctcctgttcaatatccttacgcgcattttgtttatactgcgttgcttcgttttgcgcatcggcaacgatacttgaccgttgcttttcgccactctttttcgcgtcagcgacaatttcactcgcttcagcgcgagagtgtgatagcgcatcacgccgttgatcagctaagtcactcgcttcttgccgagacttttgtgctgaatcaatgtcgttcgcaatcttgtcagctcgatcagccatcatttttgtgatgggcttccaagcaacaacagagatcaatgccatcaaaacaataaagctaatcccgataaacaacatatcaccaaggtagagaccggatgcaccgataattaaatgcgagagcatctaatgacacctccttctttcattttcattaaaatgaactcgttgaccaatgattacttgttcataaccatcaaagcaacaacgaaggaaatgataggcattgattcgatcaacccaacaccgatgaacatgttagtccgtaattgaccagataattctggttgacgggccatcccttcaagcatcttagaaataaccaaaccgttaccaataccagcacctaaagcggcaccaaacatagcaatacctgcagcaattgctcccataatctgtgtatcctccttaaaattaaaaaactagaaattattcctcgtcgttaaccttctgagaaatataaactgaagtcaaggttacgaacacgaacgcttgaatgctcccgataaacactgagaaaccttgccataagagttcaattggaaatgagtaaacatagctcaaccaaccgttgctctttgccaaatcagcaaccttcgttagtaacatttcaccagcaaagatgttcccgaacagccgaagacctaaagttaggaaatcggtaaattgttcaaagacgttaataaccgagaaaacagcaaaaggttgtgtgtattctttcaaataaccacccatacctttcttacgaacacccgcagcatgtgcaagtgcaacggtcataaacgataacgtcaaagtcacaatcggatcggcggttggactcttcagatacgtatactgcccgacctgaacgtgaatgaacaatccaagttggttagcgatgaagataaagagaaacaatgtaaatgcgtacaaaccgaagttagacgcttcgttacccttgatcgaccctttgacaatgccattcgtgaactcgatgagccactccagcacattttgtccacccttgggcttcattgttaaatgtcgcgaaagtaaaaaaacaaacaagaaaacaatcagacaagtcacaattactgagatgtcattcgcgatattaaacgtcagtccaaggaatttgactgtaggaactggatcacccactgaatatcacctctttcctttaatttcggtgctacgataaccttaacctttgagctagtcaacgtcaattttatcgtaacctgaaatggtagattagagacacccctaatcaaaatacaaaggtaataataccaccaccgtcgaaaaaattcaaaataatttcaacatttcgtcaatcaataaaaatccaacaatatcaagctttcattaagctttcaaatcgttggatttttattattttgactttattttcattcttggcacgcgcaatgacggcctacttctcatttaccgccgtctttggcagcaccaagttcatcacaattccgagcaccgttgcaactgctagaccactgaactgaaagcttcccagttgtaaataggcattgccaattccaatgaccaaaatcgctgatgcaatcattaaatttcgcttctgattaaaatcaactttattatcaatcagaattcgcatcccacttgaagcaattaccccaaacagtagaaagctgaccccaccgatgacgggtgatggaatactctcgatcaacgcggataacttacccacaaaactaaagacgatggcaaaaaaggcggccccaccgagcacataaatactgtggacccgcgtaattgccagcaccccaatattttcaccataggaggtcacgggtggtccaccgacaaagccggcgataatcgaggctgtcccgtcaccagccaatgtatggttcaagccaggatccttgaagaaattccgcttagtcaacttattgagtaccataatatggcccatatgttctgacatcgtcacaaaggcgattggtgccatactcagaatcgcgccccaataaatgccaggatgataactaataaaaggcaattgaaaggcgggcatcgcaaaccactgcgctttttccacaccagaaaagtcaacgattccaactaacacggcaatgatatacccacagacgattcccaacaatatcggtactaaactcataaatccacgcaagtacatgttaaaaatgacggtcagtaacatcgtcgccatcgcgacgccgaaatatttaatatcataactactcccgttcatcgttgcgtccttagctgccgtccctgcgagtgacaacccaattaccatcacaatcggccccacgacgatcgggggaagcgccttatcgatccagtcagaaccgattaaagtaactaataaactaactagcaggtacacacagcccaccgcgacagtcccctgagcgatggccggatatcctgcggtcttcatcagagactgcatcacaacgataaatgaaaagctcgagcccatatacgccggaatctttccgcgcgtgatgaggatatacattagcgtcccaacaccagagctaaacagcgcaatacctggatttaatcccaccaggattggcaccaataccgtggaaccaaacatcgagaacagatgttgcaccgacaagcctaaccaactacctaattttggtcggtcatgaatatctaacacgacttcatcattatgaaacgccgctttctttgtcataacgcacccctttttatgaatgattgcaaaagaaaagacagcccaccactcaaagcggctaggctgtccgaaattacgcacagcttccttgaaagcgcacgtccgttcatccttttcagcctctctgagctaatttaaaggaactgtttaattgcaattagtctactcgtctccgaaataattgtcaactcaatgtttgaaccgaaccagtaacagcccctaaaaacgatattagttcaaaacatcataatatttgtgacaacattcctgaaataatgtgactttctcacccaacgttaccgaatattcgaccaatacagcgtaatcgccatctaaaacaccctaattatccagtgtcccccaacagttaatgtcaataactacctataatatacgcattgtacaaattattatttggcattaacggtgattaaaacgtgctaattagattgttgtgcgtcagccggtgtgggtcctattccgacctccggggctgggtgacaattgctggaacgcagccgacatcgatttgagctaacgcataacccgcgtcatctcaaatacgagtcttattctaagccggaagcagaccacttccagctaagaataatttggctactgagcattgtcacccagcccctccggtcggtaagccgctcaaatggctgatgaacggccacttaacttggtacaatttgtcgctgactattttgacactggaactttaaacaaagcgttaggtgcattagcactttgtcaagagattaaattttactacaccaattcaggattagtgagctatctcaatatcattttcagtctgccggttgattgacaaaattactggttgtaaaaagcaacgacaaattcatcaaaagttaggtacatcttcgtcagccattcgaacactgtcacgactggaagtcggcttaggacgaaccagcaaagcatgtttacgcccacttacacccgtttccagtggtccatagctggctgcttttaatcttagaaattagcacgttttagtcacgattcatgactaatgaactcacagaatgcggatgattatagctaaagttgttaataattttggaaaacaaaaaggtagccccccagacattgcctggcggtgctaccttttgtcaatgcaacttacttcgtaccaaataaccggtcgcccgcatcgcccaaaccaggaacgatgtagccatcttcatttaaatggtcatcaagtgctgccgtgtaaacgtcgatgtctggatgtgcgtcccgaagtgccttaacaccctcaggcgccgcaactaaacacataaacttaatattacttgcgccgcgctttttcaacatatccatcgccatgatggctgaaccaccagtggctaacattggatcaacgacaaataattgccgttgtgaaatatcacttggtaatttaacgaaatattcgaccggcttcaaggtcttttcatcccgatacatcccaacgtgcccaactttagctgccggaatcatgtttaagaaaccgtcaaccatccctaagccagcccgtaagattggtacaatggcgactttcttacctgccaacgttttttgcgttgacttggcaatcggtgtttcaatctcaatgtccttcaacggcatatcgcgtgatacttcgtacgccatcaacgttgaaatttcgttaaccatttcccggaagaccttagtaccacagttcttttcccgaatgatcgtcaatttatgttgaatgagcggatgatccaaaacctcaaacttacccatgttgctacgcacactccttagtgatttctttctattgtagctaatttagagagaaaaaaccagacctgatataaattacttaatcaacatcgatcgggtgcttcgctgttaaagccattgcttgctgtttaacgtcatctagatttgcttgatctgtcggtgcttgtaacgcttgcaaaatcaattcagcgaccttagttgcatcagcttcgtcaaaaccacgggtcgtaatcgcaggtgttcccaaccgaataccagaggtcttgaaagcccctaacgtctcattcggaatcgcttctttgttgaccgtaatataaaccgtatctaacagatcttgtacttggcgaccgttcaaaccagacttagtgacatcaatcgtcattaaatgattgtccgtgccaccagaaataacccgaaccaagtcagagtcattgaagaccttcgccattgccttggcattatcaatgatatgttgggcataaaccttaaactcaggctgtaagtcttcgcccaaagcaatcgctttacccgcaattacgtgatccaacggcccaccctgattgccagggaaaacggctgagttgatcttcttgccatacttttctttcgctaaaatcataccgccacggggcccccgtaacgttttgtgcgtcgttgtcgtaaccacatcagcatatggcactggattaggatgtagcccggccgcaactaagccggcaatatgagccatatcaaccatcaataaggccccaacttgatctgcaatctcgcgaaacttcttgaaatcaatcaatcgactataagcagaagcccccgcaacgattaactttggttgaaaatcttgtgcttgtgcaagaattgcatcatagtttaattcttcggtttcaggatcgagcccataaccttgaaaatcgtaaagtttaccagagaagttcacactagatccatgtgttaagtgtcccccagcatctagtgacatccccatcacccggtcaccaggttgaatcagtgccatatatgcagccgcattggcttgggaaccagagtgtggttgcacattagcatattccgcaccaaataatttcttagcccgttcaattgctaaggtttccacttggtcaatgtattcgttaccaccgtaaaagcggtgacccggatagccttcagagtatttattggtcagcacactcccctgcgctgcccggacgccctttgaaacgatgttctcagaagcaatcaactcaatattatgttgttgccgtgcctgttccttactaatcgcagcccatacttctggatcttgttcctggtaattcatgaataaatctcctccatttcgcaagtgacaactttcgggttttcccgacttgcaatcattatacactaaaatgagtctgaccggcagatttatttaatcggttcatgtaggcaagcccaagtcctttattttcaaaggcttggcacagaatatctttaatttccgtctcagtatcaaagtgccgcaagcccgcgaacagctcccggcttgccgattgaatatcttctccaagcgaaaattgttcgcaattagccggaatttgattgttagttaaaatatcatctgttgccataacgcccattggcacatcttgctgggctgcccacgccagcgcttctggccaatcttccgaacgatcaacgatataaacttgtgcgtttggcgcatagtgcttatatttcatccctggcgccttaggaacttctttagctccgacatggtgcaattcggtttgaactggcatgccaatgacccgttcgattgcttcaggcgttacggcaccgggccgtagaattgctggtttgtcggttgaaagatccaaaactgtagattcaacgccaaccttcgtcggaccatcatccagaataccagcaattttaccacgtagatcatgcaatacgtgttgcgccgtcgtcggactcggcttaccagatgtattagcggatggtcccacgataggcgttccggccgcacgaatcaaagccagggttgcctcattatcaggattacggaaagccgccgtctgcagcccgccagtaacttccggtgccaacgcatctggtttcaatttaaaaatcatcgtcaggggtcctggccaaaacgccttaatcagcttcttggctgcttccgataacggttgagcaaaccgctcaaccgtttccacatcagcaacatgcacgatcaaaggattatcactcgggcggcctttagctaagtacacttgcttaacagcatccacatttgtcgcatcggcacctagcccatagaccgtctccgttgggaatgccactaactgccccgcagttaacaacgccgcagcagccggaatctccgccggcgtatatactttcgtttccataatatattcaaacctctactttattattaattcatcgttactttcatataatattctttattatttacatcacggacttaatcaattgctcataaatttacgccgtacctcccaggttaaaaacagcccgcttaggataagactcacatttgagataacgcgggttatgcgcgagctcaaatcgacgactgcgttcacccacccccgaaggccggaatgggacgcggattacaaacagcaatctacctaatcggcccgcttttatcagcattctccaggataacgcgcaactattgccgagtcagagtcattgcaactcgcagcatccgattgtgacccgccatgtcttgtcgcagcgtcacggtcgcgtcgggcatcgactgcgcgaaaagcgtctgcaaggccggtccctgatggtagccgaattccaagtataagcgaccggtcgaagtcagatgatcggcaaccgtcgtcgctaactgctcgtaaagtgccaacccatcgtggtcagcaaataaggccgtttgtggctcgtgggcgaggacgctggcgtccatgacgtctttttcgctcgcagcgatgtatggcggattactgacaataatatcaaacggctgcgcagatacgctggtcaatagatcactgtgaaccagcttaacatctaaatgtaggcggtccgcattggctttggcaacttgcagcgcagcggttgaaatgtcgctggccgtaatctcccatgccggccgttcgtgtttgattgccaatgcaatggcgcccgagccggtaccaacgtctaagagtcgaactggcgctgtcgctgggacatccgtcaaaatccagtctaccaattcttctgtttcgactctaggaataagcactgctggatcaacttgtaacgtgagtccataaaacggtgcgtctccgagtacgtactgcactggctcaccagcaacaacccggtcaatcccctgctgataagcatgccaaacagcactgggtagcggctcgcggtaacgaatgagtaattgtgtctggtctagccgactcaagcccaataacaggaagcgagcactatcagtcggcaactgggccgtttttagacaaaaagaagcccactgctgggcttcaaaataagtgggttgagtgggcttattcattagttaagcgctccattttttcagcttgatcagctaaaacgagggcatcaataacttcgtctaactcgccgttcatcacccggtcaagtttgttgagcgttaacccaattcgatgatccgtcacccgattttgtggaaaattgtaagtccgaatacgttcagaacggtcacccgtcccaacggctgatttacgttcagcatcatattcgttttgttcccgtgactgatagtagtcgtagacccgtgcccgcaagatttccatcgctttggcccggttttgctgttgcgaacgttggtcttgcatcgagaccacgataccggttggtaagtgggtcatccgcaccgctgaagacgtcttgttgatatgctgaccaccagcaccagatgaacgaaagacatcggtccgaatatctttttgatcaatatcaatgtcaacatcctgcgcttccggcataacgccgactgttgcagttgaggtatgaacccgcccagctgattcagtcactggcacccgctgtacccggtgcgcgccactctcatacttcagcttagagtagaccttgtcaccagaaatgatcagaacgatttctttaaagccaccaacttcagtttcattacgatcagccacttctacttgccagccttgacgttctgcgtacttcgagtacatgttgaacaggtccgcagcaaacaaactagcttcgtcaccaccagcagcaccgtgaatttccatgatgatgttcttgtcatcgttagggtctttaggcaacatcaataacgtgatttcatgttccaattgatccttttccgcgttaaggttctttaaatcatctttgaccatcgcgttcatctcatcgtcgagcttttcatgaagcaattcgtcattttcttcgatctgactcgtgacttccttgtagtgattatatttttcaaccgtttcacgaatattacccatttccttagataacttcatgaaacgttgagaatccgaaataacttccggatcacttaatagttcaccgagttcctcataccgatcggcaacggcttgtaacttatcaaaaaacttatccattctcagttaatcctcactttgttaatttcggcgggtaaaaataatgatgacgacaaactgggtagtacgcctcattacccccgatttgaacttgttcgccttcataaacgggctgaccatcgtggaaccgtaaattcataattgcttttttacgacagaaccagcagattgtcttcatttcttcgatcttgtccgcatatagcagtaggtacttgctaccttcaaacaattcgttacgaaaatcattctttaaaccaaacgtcattactggaatctttagctcatcaacaatgtcagccaattctaggacgtgatgctttttcaaaaattgggcttcgtcgattaaaacgcacgcagcatccggattggtttgtttaacgatctcaaaaatattggtatcatcaaatactggcgttgcttcacgtttaaggccaatgcgactcgcaacatagcccacaccatcacgattatctaagccactcgttaagataatgaccgacttatcttgttcctcatagttatgggcaactttcaaaatttcaatggttttaccactgttcatcgcgccatatcgaaaaaataactgtgccaagcgactcattccccttttttacacatttctagtcaattatagcggatttggccgtgaatttcagcattctgtcattaaaactaattaacgaattgataatatgcggttaaatggcgggagtatcacttttcttttagggacgttcagtataaaatacttgagagtaggacattttgtccggtaattatgattttaatacccggtagttggtcacactgatcatttcccaggtaaatcaagaattaggggtaccgataacttatgtcaattaatagtacattagccacctggacgggtaaatccgcatattggtttttacacaccttccgtggcggtgggagctcactccccggcaagttagcgctgaagctcgatccaacgattttaaagcatctcgctaaaaactacgacgtcatcgtcatcactgggaccaacggtaaaacgttaacgaccgccttgacggtcaaggttttacgtgaacagtaccctgacattttaaccaatccaagcggatccaacatgaagcaaggtatcgtcacgacctttttacgggcacctaaagcgcaccaaaagccactcgcagttctagaagtcgacgaagctaacgtaatcatggtcaccaagtacatcacaccaaaagcctttgtcttcacgaacattttccgtgaccagatggatcgatatggtgaaatctacacgacatatcaaaaaatcttagacggggttgctttagcacctgaagcgacaattattgccaacggtgatttgccactcttcaatgccaaacaattgcctaatccgatactgtattacggatttgactaccagcccgaccatgaccaacaagcgccagcaaatacggatggcctgctttgtccgcgttgtcagcatattttgcgttaccatagtcgaacttatagcaatatgggcaagtattattgtccccactgcggttttgagcgtccacagttgacatacaaattaaacgccctaaccgctatgacaccgactagctcagactttgaaatcaacggtcaggccatgcatcttaatatcggtggtcaatacaatatttataatgcgctagctgcctacgcggttgggcgcttcatggacgtcacgccggccaaaatcgcgcacgcccttagcgacaacgatgaacaagtctttggtcgtcaagagacctttcacgttggcgaaaaggacgtcacgctgattctcgtcaagaatccagtgggccttaaccaagtcttgcaaacaatcagcaccgatgaccggccattctcatttgccgctctgctcaacgcaaactatgcagatggtattgatactagttggatctgggatggtaattttgaaaaattaccggcattgaatattcccgcctatattagtggcggtgaacgttatcgtgatatcacgttccggctaaaagttgctggcgtaccggaagatcagttaaccattattcctgacctgaccaacatgacgaccgcaattcaaaaactaccgaccaagcaagtctacgtcgtcgcaacttacaccgcgatgttgcaattacgaaaacaacttgctagccaaggcattatcgatggggggatggcttaaccatgacttatacactacacgccgcacacctctacggcgatctaatgaacacgtatggtgatatcggtaacattttagcaatgcgctactatgctaaagcagtggatgccgacatcactgttgacttagttagcttggatgatcggtttgacgaagaaaaatatgacttcgccctcttcggcggtggtcaggattacgagcaaacgattgtttccaaggatttacaaacgaaaaaagacgccttgaccgcatatatcgaagccggtggcccattattagcaatctgtggtggctttcaaatgctgggccattactacattggggcccatggtgaaaagatcgcgggtatcggtgccttagatcattacacgctcagtcaggataacaatcgctttattggtaatataaccattgagaacgccgaaacccaccagacctactatggttttgaaaaccacaacgggatgaccttcctgggcgaaggtgaacggccccttggtcaagtgctccaaggtaacggcaataatggcaaagatcaatctgagggcgttatctacaagaacacctttgggtcttacttccatggtccaatccttgcacgcaatgaagccctcgctaaacgaatcttgaaactggccttacaacgtaagtaccctgaaggcaacttcgatgcactggatcaactcaacgaagacctcactaaaaacgttatcgtgaaaccttaaaacgtatcactcaaaatcgccactgacttagttaccagccagtgacgattttttagtttgatccgtattaattggttacaatgataatagtttttggaagccttctcattagtaaaccccttcaagctataataaatatttatatactttcagatagtgattattaataaactgatactatcagtagatacacaaaaaaagattgatattggcttccaaccagtatcaatcttttttatcccatcaaggggttaactaattatgccttagccccaggttctgaagcaataatttgtaaatcgcctttcaatgtccattgttttacgtcaaatggcaagataaagtggacgcccttactcaatggatagtcttgaccgtcaacgacaatgctaccttcaccatcaagtacagagactaacgtataaggtgctgttccccggttaaaagttgcttgcccatttgttagccgccattgccaaacaccaaagaatggtgattggacgtatttggtcaccgttgcatccccaacctgggtagtcgtgatgtcaagatcagggtcatgatgcggaacgttagttgtatcaatggattgttgcaaatgcagctcgcgcttctgaccagtggtcttgtcgacccggtcccaatcatatagccggtaagtcgtatcagaactctgctgcgtttctaacaccataattcccttaccaaccgcgtgaatcgttccagatgggacataaaggaaatcgccgggcttaacgggcactcgccgtaatagcttattccattcaccgttgttgatccattcagcgagctgttcacgggtcttcgcatgatgaccataaatcatcgttgcacccggttcagccgcaatcacgtaccagcattcagtcttgccaagttcgtgctcgtgttcagccgcgtacgcatcatcaggatgcacttgcaccgacaaatcttcactagcatccaagattttcgttaatagtgggaagacatctcccttagcatcaccgaacacatcacgatgttctgcccatacccgatccagtgtcatgccagcgtacggcccattttcaacggtcgccggaccatgcggatgagctgaaatagcccaacattcaccagtatgatcactgggaatatcataattaaaatcatcatgtaatttggtaccgccccaaattttttcatggaacaccggctttaaaaagtatggctcactcataagatctactcactccattgttgaatttaatatctaaattttagcataaatgaaagcggttgtgaaaccgaagtagctaatttgtaaccgtatccgccaaccaagccgcaattaaccggcgacgtgctggaaggaataccgaattatttgcaactggatgcacccggttggataagaaaacaaggccccgttgccgttgacggtcaagcatcaggagcgtaccagtataaccagtatgaaaaatcaccggcagtgtctcatcagaacggtgccagaggttccaaccaaagctccggcgtaagtgttgattgggcgtccaatcttgatacaagcttgcaatcgtagcctgtgatagcacagctggtacgtcgatttggccgagcatcagttgtgaaaaccgaacaaggtctgtcacactggcaaataaaccggcggaaccacagtgttcacctaagactctggccttaggatcatgaacgatcccccgtaacaacccagttttcatggaatacgtcgtcggaacggtttgcgctagttgaggttgaaaactcgtgtgtgccaaccctaatggctgcaagacgcgctcagtgataattggctgaatggccgctccaagaattcgttcaatgacttgccccatgatgatcaagcctaaatccgtataaaccacccgatgattgcggttacgctcactgattggtagctgttgaatcgcggctaataacgcatccgctgacaacgcattccgatttggaatataaccactcagcccacttgtatgggtcattaaattacgaaccgtgatcgttgtggactgtaaagtcggtaggtagtcatgcacggggcgatcaatttcaagttgcccattttgcatcaactgcatcgccacggttgtcgttcccacgaccttagtaaccgaggccaaatcatacatcgcatccggccataatggtttgatcgttggttttatttgagcgacgcccacttgattcgtgtgccactcagccccatcgatcaaggcataactcgcccctgggatcacttgatcttggaccatttggttaattagtgctgcggttctactaaaagttaacattaatttattcattctctcttattaggatcatgattcaagtcgggattgactgtggctaaaccgccttcaaggtcagtatcaaccaagtaacctggcaaactgtccacgttttaccctgacaatttctacggatacaaactgacctgattgcatcaacgaccttcccgaagctagtgctgacttccgaataaccgcggtaatgtgaccaaccaataactgattaaagcggccccgccaatgacgagaagccattgattcgagacaacctgatgattatacagtaacgtacagcccaccaaaattcccgtgctgacccattcaactgtctgccaatgtcgattactccactttatcatcttgcccaactccctttaattttagcgtttcttcagcaactttacatcacaatcagcaatcttaacctaaccgtaacgtccccttagccgaataactgtcgttccaatcatgcgtctactgattagacagcatttcttactattcacaataccacgtgcatcatgcgcacgcacataaaaacgactttagttccacccgtatcacgggtcttactaaagccgtctttttattcacacaaacaacactgtacttagtctaattcaactttctggacccaaccttcaggcgcttcccgatcgccaaattgaattccagttaattcatcatataattttttcgttaccggaccaacttccgtttcactgtagaacacgtgtaacttgccttgatgttccaagccaccgattggtgaaataaccgcagctgtcccacaagccccagcttcagcaaaccggtctaaatcatcaatgtagacgtcgccttgttcagtcttcatcccaaatttatgttctgccaagtagagtaatgaatatttcgtaacggaaggtagaattgatggtgacttgggtgtcacaaaagtgccatccttagtaatcccgaagaagttcgctgaacctacttcttcaatcttacgatgttcaaccgggtcaagataaacacagtcggagaaaccgttggcatgagcttcttgacctgggaataagctagccgcataattcccaccaactttataagccccggttcctttatgggccgcacgatcatattcggacgtcgtaaagttggttggcgtcatcccgcctttgaaataactaccaactggcatggcaaagaccgtgaagatgtattcctgagctggatgaacaccaatgttacccccaaccccgatcatcaatggccgtaagtataaagtcgcaccagttccatacggtggcacgtaatcttgattagccttaacaacctgtttaacagcgtccacaaacatgtctgtcggcacttgtggcattaataaccgttcacagctggtctgcattcgggctgcattacgatctggccggaataattgaacactaccatctttagtgcggtaagcttttaagccttcaaagtcttgttgaccatagtgtaatgctgttgagccttcactaatatgtaaagttgcatctcccgttaattcttttttgtaccaagcaccatctttccaatacgcacgataacggtacggaagattccgatattcaaaccccaagttgttccagtctaattgtacgtctgccatatgcttcgacttcctttatatgtaattttccaaattaattaatttgaatttaattaaaagattaatggttaattagaagtttgtcaagggcccgttaaacatttccaacgctttaagatttttttggtataatgagtgtaaatttagcaaaggactggtttgtcgtggctagtaattcagattcaatttataacgtcatgttttatatcacccatcacccgactgaaattcagtttacccaaccggaatacacgaatgtcgttcggatgggtgtccccgatcatattaaggtcgctaaccccgaaatttattttcctgacaacaagctattagtcaaccgatttcaggatgactttgtcgctaaaaacggcaacttacttgacttcttcttcgattacacagagaaaaaggtccctaactaccatgaagtatgggtttcttcggcccatttaccagccaaacacttatacttcttagagttatcatttgagtaatttaacgcacgtaacctttacgatctatttggaatcaaatttaacaatcaaaaaatcaccacctggattatgttcatccaggtggtgattttttaattactttacaagcgtaaaatgcagccgacttagaactacgggttcgtcccgtcataacctcgaatagtgagctttacttgactaatcaaagtccagtcgcgctcataaaacgttacttagtcataaagatatacaagtcagacgtggagacaccaatcgtgaagcgaacgcccttagaggtaatcggatcgattgtcgtcgtactaccactattatccttggtttccttctggaactgtttcataaccttcttggcattggcgcccgttgttgtcgtcatcaaagcaaacgccgtcccaaagttcttctggcgggtcttgttcttaaaggccttggttggaacaatcatcgctgcccctaatacgtcacccttctgaacatttagccggatcttataatccttagttgttaacacgttcttaatgccatcacttggcatcttcgtcggtaacaattgcgacttgacctgctttttcgccgttgccattgccgcttcgacctgcttctgagtcgtttgcaaactagctgctttggtcttgagctgcgccgcagcagtttgttgggcctggagtgtcttagcacccgtggcagccgccgtaccgccagccttgatttgggcctgggcttgcttgactttggcttggatcgttgcttgttgctttttaagggctgcaccctcagtttgcaacttcttagccgcctgttgatcagacttgctgagtttagaagcaatcaaagcctgattgtaagtcgtcgccatcttttgatagccaactagcttcttggcgccctttacgtgcaccgtcgtggtatccgaaccggccttaatcttcaccgtttggcgggtcgtcttggtcggaacttgaataacaaacgtatgattacgcaccgtcgccgtcttcgtctgaccaccgtcaagctgataatgaacctttttaacgttggattttcctttgacggccgctactaacccgttcggcttgtatgtggttttagtcgttgataaggttgtcttgccacagcccgctaataagaacgttagcgcacccgcagtaacggcaaccattgctgttttccggaacaattgacacccctcctttagtcgagactaatattgccagtaaattgactgttatatagatccgcatagaacccattttgagccatcaactgttcatgcgtcccagtttcaaccactgacccatggttcatcacaataatgttgtccgcaccctgaatcgttgataaccggtgcgcaaccacaaaactggtccggttcttcaggagtcgttccatggcatgctgaatatgcacttcagtccgcgtatcaaccgaactcgttgcttcatccaaaatcagaatttctggattagccacaaacgcccgggcaatcgtcaataattggcgttgtccctgtgaaatatttgaagcttcttcgttcagaaccgtctgataaccatctggcaatttgcgaacaaagctatcaacatgggccgctttagccgcagcataaatctcttcatctgacgcatcttcacggccgtacttcaagttgtcaaaaatcgtcccagtaaagagccaggtatcttgaagcaccatcgcaaagtgtgaccgcaagtcttcacgatccaggtcccgtgtatcggtccctttcaatttaatagaaccacctttgatgtcataaaaacgttccaacaaattaatgatggtcgtcttaccagcaccagttggcccaacgatggccacttgttgcccacgtttaacgtccagattataatccttcattaacaggtcgttatccgcataaccaaattgaacgtgttgcagactaatcaagttatcactatctggttcggctggtaagttggatttcgtctgtttcatttcttcttcatcaagcacttcaaagacccgttcagcggaagccacggtcgattgaatcgtgttcaacaagttcgccatttgtgaaatcggttgtgaaaattgttgcgtgtattgtaagaacgcttgaatgttacctaacgaaacgttcccgttagccacatcaatcccaccaatgatggcaacaaagacgtagccaatattatttaagaacatcatcagtggcatgataatacctgaaataaattgcgctttccaggctgattgataataattattgttttggatttcaaaatcatcgatggcatcttgttccttgttaaagctcttgatgaccacgtgtccagcatagttttcttcaacttggttattcaacaaccccaagctcttttgctgtgttccgaagaatttctgtgatttcggcgcaatcacaccaaccaccacgacactcagtggaatggtaacgagtgcaatcaaggtcagcttccaactaatcgtcagcatcatccataaggttccaacaaaggtgacggtacttgtcaccgcttgggttaggttttgctgcaacgtgttggcaatattatccatatcattgacggcccgactcataatgtccccattcgaatgggtatcataatatgaaatcggcaccttttgcatcttacccttaaatgaacgccgcaacttatacacggtccgttgggaaatccgcgtcataatgtactgttgaataaagttgaacagtgctgaggccaagtacatgatcaaaacgatcataataatctgaccgattttttcaaagttgattgggtaaccggattgactgataccagccttctgttgcgcggcccccttcataattcccttataaagttcggtcgttgctttacctaaaatcttaggtgttcgaatctggaaaatcacggaagcaatggcaaaaatcatgaccactgccaaaccgacccaccggtctgacatgtagcgcatcaatcgaatcgccgttttccaaaaactcttaggcttttcaactagtccagcatgaccaccggggccatgaccgccagcaggacgtgcaggcttagtagaactcgtattcttttcgctcattacagctgatcctcctctcgtaattgtgacttcataatttcttgataaacttcattattagctttcaattcagcgtgggtccccttgccgactaacttaccgttatctaggaccaagatcagatcagcatccgccaccgtcgcaattcgttgcgccacgataactacgacactctgttgaatctgtttatcctggcgtaattcagcccgtaattgagcatcagtcttgaagtccaatgcggagaaagaatcatcaaatacataagcggaagcctgtttgacaagtgcacgagcaattgctaatcgttgccgttgaccaccagagaagttacccccaccttgttcaacgtgtgcatccaggccgccttcttctttaacgaagtcagttgaacgagcaatttctaacgcatgccagatttcatcatcggtcgcgtgttcgttaccgaattgcatattttcacgaatcgtccccgtgaataaagtagcagtttgcgggacaaacgaaacggcttgatgtaaatcagctaacttcaactgccgaacatctttcccatctaatttgaccgccccactctcaatatcatagaatcgagggattaaattaacgagcgtggtcttcccagaaccggtcccaccaataatggcaacggtctgtccagaatgggctttaaagtcaatatctgccagcgctaattgctccgcactttgataccgatagttgacatgatcaaattctaagctgtgttcagtcgtcgctggtaacgttgctgccttgtcagggtcagtaattttaggttcaatactcaagacttcttgaatccgggaagcggaagcggccgcccgtgggatgaacgcaaataccatggcaagcatcatgaaactcatcaatacttgcatggcataagtcataaacgcaatcatgttcccaacttgcattgtttgactactaatcaattggccaccaaaccagacaattgccacattagtcccactcataatcaaagtcattaccggataagccaaggccacaatcgtattaaccttaatcgcattgtgcgtgtaatcttggttagcgtcttcaaaacggtcctgttcaaatttatcttgacggaatgctcgaataacacgtactcccgttaagccttcacgaaaaacaaggttgatgcggtcagtcttagtttgcatcgcccgaaacaacggtattgcaaacgccatgatcaaaccaataaaaatcaatagtaccggaatagaaaccacgaagatccaagttaattcatgactcttggtatacgctaaaaagcttgcaccaatcagcatgattggcgccataatcatcattcgtaacgccatcatggccacgttttgaatctggacgacgtcattggtcgttcgagtgattagtgaagacgtctcaactttatcaaattcatcatttgaaaagttgatgaccttcttataaatatccgaccgtaaattcttccctaattgttgtgatgaccgcgccgccaaaaagacgttgccaaacgctgcgacgactgataacaatgaaaaaccaatcatttcaaatccgattttccagatataactaatgtcaccagtagccaccccgttattcacaatattagatgtcaaactaggcagatttaaggtcgcaatcacttgcacgatcataaataagaccgcaccgattaccgcgggatacgaaatccgaccctttgctattttaagcatttgcacgctccccttcattcattattacataataatgcagtatcttaatctaactaaaaatggtccttttgtcaaccatctttacaagtctcacgtaaaatattgtaacgcactcatcgcagtttagcactcaaaaggatttaagaatttattaagctcgccttcgtaataacacaaaaaaagtgctgcgtcactaatcgctgacacggcactatgcctaaatttaagccaatacttcttgtatattttgaggtacctgatttgtcgcaacggcctcccatgaattcacgttttgtcccttcgtctcaatctttaaatagtgtcgttgctttagccggtgatctgcggtaaatgtcaaccagcgttgcttaccttgcgcatcgctggtcagcattcgataggtatagatatcttcgcccatctgaccagtcgagtggccgattgcctgattagtccgaccatagaccgtttgtaccttaacaaatgggtttaagttatccaccgccattgccagctcactcccctgattcttcgtcatcgtcggtacaattaacaatgtacctacactaatcatcataataatcgccgccaaccaaatagccctttttttattcataaatactatcccccgaattaattattttattaatcgtatcggagtaaagctcctctggctaccctaactaggctttcttaatcagtttaaacgattactaatcaaattcgattttccttaaacattaaggaaattattttaacaataattcaataattatcgcgctttgcatgctattctattagaataggaagtagtttttaaatcatggggggatttatcatgcacatgcggggtatcaactttgtattaggtctcggcgtcgcgctcggcctgttagcaggctgtcaggcggcttcaccggcaactaaacaagccagcagtcaatcatctaagactagcgctaaaagcgttcacagctcggctaaacaccaagcacaagcacggccttatcaacattggcataccgtcaaagatgttcacttgcctattttgatgtatcacagtatttctagcgggaaccagttacgtgtccccgccaaagaatttcaaactgaaatgacttatctaaaggcacacggctaccgaacgctgactgccaatgaagccgtatacgcgctcaaacatcggcgaattccacaaaagaagattgtctggatcacactcgacgatagctataaagataacatgacagcagcttggccaattttgaaacagacgcaccaacacgccaccattaattttattaccggctttacccataagaaaaaccacttaactttagctgatgctaagcggatgcaagcatccggtaatattgattttcaaagtcacaccgttcgccatctggatttaaataatttaacttaccaggttcaacttacggaattatcaagttccaaaaaatggctcgatcataatttacaacagaacacacaagttatttgttacccagccggccgtgctaatcagcagaccattaaagccgataaacaggctggctatcagtatgccctatcaacggcacctggcatcgccaccagcacacagaacccatacaatctcactcgacaacgggtcgtacctggaatgtcgctaacggcctttcagacactattaacgagtaataattaattcataggacccttacttgtgacacgatcccaaaacccttttttatgagcgcttaacagtgctgttgtgatcacaacagccaaaacgcaaaattggggttttaatttgataccaattagcaaaagagaagcgtcataatgctgatataccagcattatgacgcttctctttttatctaccgacgtcgacttatcacccgcacggtagttataccattaagggtagcacgctataaatgccatttataagccatttctgaaaaagagagatttttaatttacaaatcgtggaaagccccaaaacattctataattcgttatttcacgtcaatcgtttattttaattaaccattatctattttcaaaagttagcctcgtaatcagaaacactcgttcgtataattatttaaggtgagataacagaatgttactgggtgaccttttgataaaaaatctttcgttttaattttaaaatagaaatatcattatgccgaatttaacatttacttttagagttataatagttacagtttgaagtttttcagctttacaattgggaggctatccatatgaacacactgcccttagatatttctaagaatgagaaaagattgttggaccaggaaactgtcggtttaattgagtttgtatacaatgaagccatgtcaaatattcaaaacggttgctggcgctttacatcatcaacatcatatgaaaaggaatctgagcctataggatatgataccgacagtctagaacgctattttaataataaatcagattaccaagtagatccgttagaaaatcacattctaagtacaaaatttccagataacgtgtcatttataagctgcttttacatcgtcacaaaaaacgatttaacccaagatggacatttatccaacaaatttattcaagatatagacagaactgaaataaacaaacgagggtttattctagtaaagcataactacataggaccctttctaaaagcactcaataactgtgttgcgcgagaaaacttaactggtgttggttacttttatagatatgtaaattatcgctctctagatgattattgtaatctagctattccgattgaaaagttattagcttcaaatagagacatcgatttatctgatataccgttagatttaccagaatgtaacacagataatatttacactcagagcgtcaaaatgtcagtgttgaataagcccaatttttttgaacctcagcatgaaggcagagtgggagttagctttgcaaaaccacagactaccaaaaatcatatttctcaagtaacagttccgaaaaaaggctctgcatacttgcaacttaacgcaccttcagctacaggatttttagagttttataataattatgaagaaatcaaagaaataacatttgaataaacaacaaaacctcacgccggccaattaagactagtgtggacttttttcttattttatctaaaattacaacttttgtagttaaaaagcaattttttactattacaccgatttttgtaatcattacacagttatacaatgaaagcgtaaattttacaacaaacgaaaaaagcccctataccagcaattgctagtataggggtttcgtctatttaataatcaattttatgcccggataaatcgttgaatagatactcttaccgttttgtgatgctaacgtatacatgctcaggccgtttcgtttggcaatcgaccaccaactatcacctgaaacgaccgtgtaatacgtgtgagaagcaccggttttagagtatcacctgccaattaccattaatgtgtgtttcacagtagtgagtattaaagttgcacgatttttcatatattactatgataacaatggaacctactaatatctggtttcctctttcgctaagatactttttcttatgtattagccgtctgcccttacagcaggcggctttttatgcaaaaaaatcccccgcgccgaaacacaggagaattaatcaagttataactatcatctagaaacatcctagagacagctaacattatacttattatttaccgttttgtaaagcttgatcgagaaatgacaacgcttatcaatctgtatcgcaatactcggagtagcctataagcctctttacatttgccagctttgatgtataattattaacgttttcccttggcctttagggaggggataacagaaaaacacctattttactttaagcattgggccagtcttgactggtccttttttgtaaaccttacaacaaatcctacaccgaccaattaaggttagtgtgggatttgtttcgttaattcacgtactataataattttaaatttggacctttttcctttatttctgaaatttgtatagcgctaaataaagaatttaaaaaatcaaacgataatccttcttgatagagtgcatcatcaacacttatcccctccgaatttaaatactccaaaactgttttaataaacgtcggaaattctatcgatattgtatcgtctaatggctctttttttctccacccatttctacttatttgttgaaaaacgtgtgtcatctcactttgagttaataatccaatttgctttccacgaatagctaaagcctgtatagaaactagccaatgtgattttaacgactttaaaaattctaaattagtagctaccatgtccatcagaatcccttcctcaggcatcaaaaataagctagcaaacatttgtgcctcactttcaaccctcttatttttttcactagattttaggatactttctgaatatcttgagtgcaaaaagacatgtcccaattcatgagctaaactaaaacgaattctaactgcactttttcctttagtattaatgatcacataaaattggttatccactacttttgtcaaggcgtcaatgccagctatatcttcattggtgaaaatgactcgtacacccattttttccattaagagggttacattggaaatcggacctatcccaagatggtacttacgacgaattgatttagccaattcgtcaatctcatccacatctacaagccgaaattcatcactactaattactaaatcattatctttaaaatccggcaactttatataacgacctatcaccttaaaaaaactactatataaaaatactagttcctgcatagaatttctgttttttgttggaactgccgcacttcggcgaaaaaagttcgcagtatccacattattccgagaatcgccttttaaaaaaaagtaatagggaacttttaaaactgcagataatttttggatttcctcaaagtttggtacccttctattactctcccaatatgaaatttgttgttgcttaattacttttttatcagaaatcagcagtgccaactcagttcccgttaacattcttaataatctggcctgtttcaacctttcgcctttgaattggctcagtggtgaattcatattactatcatcctttattccttataaactctttaaatgtgtccacatcgatttccttaatatcagccggctttgttataaagttacgtctcaatacaggagtttctttggccaaatcaataacgctataccatgatttgtcgtttttcggtatacccaagccaataaacataggttgttctgattgataaccgtgatctagctccaaatataaattatcatcattgaaatctgaagtcttatactcattaaaatcaaaatcaaaataagattgaaaatttttattttcttgaatacgataaccggcaggaactgcaggcttattcatatttttacattggttaatggttaaatgaaaacttccttcatcattatatataagcaaatagtcgtggtttttggtctcatttggcttaactttatacttaaatggtagaatccctttatcacaatattgtttcatataaaatttaatagctaaggacttcattctagataaaaaatctgttgttccctcttgacctgaaataaaaggaaagtctttactggctttgctagctaacatatagcctttgtttacgacatctgtaattagtgctctattagttggagcaataagttcttctaatttttttcttggattttctttttgtattctgaaaccatcatctgttttcactattacaccggctttctgtaatcattacaacaattatacaatgaaaacataattttcacaacaaactaaaaaaattctcacaccagcaattgccagtgtgggattttataaatgactttacattttttactaaagggcaaagtgttaacattgcatctgtttgcttcgtttttccgattttacatcttttgactgattttataaactgttatttgataagtagcttatccccaggataaatcattgaatagattgttttaccattttgcgctgccaacgtatatacgttcaggccgttgcgttgagcaatcacccaccatgagtcacctgaaacgaccgtgtaatacgtgtgagaagcatccgttttaacgtattccagtgaattattggctaggcctgttgctagacaaccataacccattaaatcgtggctgacgtacccacccggagtagtatacggtggttagacaccaacatagcaacgttttgtttcacgacgtgcaccaaatgtgcaccaaaattcctaggcgggtaatacataaaaaaattccccacgccgaagcgcaggggaattaatcaagttataactatcatctagaaactacactagagacaattaatattatacttattacttgctattctgtaaagtcttgtagttatctaattagctatattgacagctaataatgctaaatctaaactctcactaacaaaatatacaggcaagcaacacaaaaaaatcttccacccatcaagcagaagattatcctcatcacttccggcaccactaaccgacaatcttggggggatttgaaagctgtgatactaataacaggacaaggggcataataacacttgtcggtttatatcacaataccgaaagtaatctatagaaaaatattaataagtccttgttatattaatcaggtttaatgtataataactgtgttctttattatcttaggagaaacagaacacccattttatttatttaaacattgggccagtcttgactggctcttttttatatattttgttaacaaaaaatcccccacgccgaagcatgggggactagaacggttcacgattattatactactttttctcctgattgtgaggcggattctgacgtcgtttcagtgtcagatgatgcagaactatccgctacagcagctgtggacgctggcccttgcacttcatcagcaaccttattagtcgttgcttcgacttggattttctcattactatcaactgttggcgctgccaccgtttgaacgtcagtaataacacccagcatcccgaggatcgttaatacagtattaataacggcaacaacggctgaccaatcaccagtaaacttaacaccaaacatggcaaagacttgttgaatcaaaacgattagcaaggaaataatcccagcaatcaacttaccattcaagcttccgtcagcattcttaaaactaatttttttcatttcctttggcttccttttcatatagatgtttaaattcaatgtcatgaccatctaatcgaccttctaccttaatgacccgattttcaatagcgttcattgtgtcggcattttgctgtctcacttttaaactttcatcggtaaaacggctaagccgcttgcctaaatcgttaagcgggatacggaccgtcttattgagaatccaattagctaatacacaaatactagtgacaatggcaacaatcgatccccattcatcccagcctaatcctaatagtgtatgcaattaccgcaccaccaatcgctggccaggatagatggtgatgtaaatcgtcttgccgttctgactagctaatgtagtcatacttaggccgtttcgctgagcgattgaccaccagctgtcgccagacttgactgtgtagtacatgtgagtggcaccactatttacgtattccagcgtattgcttgctgggcctgttgctagataaccataaccattaaatcgtggctgacgagcccaacgataaccaccttgaataatagcttgatcagtttttaccgtagtgcctgctggtaaggtagtgataacacttgatgaagtcgaggcgccaatgcgtagcttaaccgcagtcttgagcgtgtagatttttgactccttgacccacttggctgacgtagacggcttagaagtgtttttgttagcttcctggttgttggccttaaccgcatccttatcggtcggtttgaccgttgatttttgaccagctgtgtagtaatcagtataaagctgactgacgtcaaagccaccgtaactaatccgaaaacgagctgacccggaccattgccaggcattattattcgtataccatttctgaccagacatgacataggggtaaccagcaacccaacctgttttgcccttgatggtcatcttgttgttagcccatgatccagacgtataaatgtcggcccgataaccaaacttctgaatctctcgcatgaaggcggcattgttgcggtcattggtcgcttgggataagattccttgttcttcagccgattctacgtccgttgccagtactgcacccaccggtagccctgctgctttggctgcctgaccagcaaagtctgcttcggcaatcgcttgagccctagtcttataatgggcaaaatgatagccgttgacgtataagccagccgcttgaccattagcgatattgctagcagcatagccatctttgaaggttgtgccttcactaatcttaacggtgagggccttaacaccgaactcgttacgcatggatgtgtactcagcggtgctcatgtagccgttgttattcgacacatcgaccatgtccatgcgagcagcctgactggtaacattgaccattaaaaaggccataaaaatggcgcccaccgttaagatgagtgcctttaacttgtgcttattcaattgtctacctcctatttgtcattcctgattgaacggtcaaaagcgtcctaaaatacactggcctagtcgttttaacttattaattttcaattcaccatctcttcaaagttcatctttcacttaatacttatgatgttggcaattcattcttaagaatggattgcagcacactctgcgcctccgacatcgtaacatcgtctaacttcttatctgaaaaatctgattcagtggcagtaacattcgcattcacatatgtgccagtttcagactgattaaattgagtggataccgatgaaatcttgccagcagtaaaactccacccaccattaactgcaattagagagtcaattactgatggaatcttatccaccgcacgtttggataattcttttttggttagatcatcgaaagtttcatctttagctaagtcagtcggataaatagtgacatttgctgtaatagttactcgaccttctacttcaccacgaaggcctgcaattacagagcttgtattaccagttccatctatattataagagatgctagtgtttaataattccatcattattccccttttccatatgctttatcgaactgatcaaatactaatgcgtatacttgagctacttgcccttccatctcatatggatagtcctcaagtgcatgaaataaagctttcattcgtgcagaatatgagctgatttcaatgcttacaggttcgttaactaattgatcaaactctttttgagcttcgtccatggtgtagtcatctttcagaattagagtctttttgtctttctgataaataaaatctccggcttcatctgttttaaaaaagttcttttgtgttgctaattggtcagcgttaaattgcttgtttaggtcttcaagatgattgatcaaccaggtgcgcccaagagaagctcgacctttaagcttgaacgctgctaaagtgtttccaatggtcaccagttgcccatttgtgaatgttacttcttcttttcttgctgtcataattaactatgcctctttcatttatttgactttagtttctaattcagttatacgatcccgataattacgaatcaacgggataagagctaatgcgactcggtcatactggatacccctgactgcccctttgtcatcgtattcaacaagttcgttcagaccagcatcatccagatcatcggcgatcattccaaagtaagtttctggatttttagcactaggattgagcgtcttggatagtacttcttctttgtctttccaatgcgcaactggaacttctaggagtttgtcccccatcccagtttcaaatgatcgaacaatgtctgttttgtacttagcggcggagttcgacggaactaatgcaccgtctggggccaaataggcgtttgcgccatgagatgttgaatgggtactctttagataaatgtaactagcctgcatactgatgttagaaccatgtagacctgtccctgcatgaccaggatcaccaactcttatatacggtgagagacctatgccatcagtgaattcacgaccaccggatataagcacaccccgttccgcaccgccgatcttggttacttgccatccggaggtcgaatgccctccagaaatacctgcgaacttttcttctcccattggcgaagtaaagatatttccatcgttagctccgttagtgaccacaaaatagtcacgtccccagaacgttgcaccaccccatgaggcccccgcctgagcgttactgatgcgaacatacggcgtagattgacttgagaataatgtcggttggatcatttgaatttccccaccagatataaatacacgattatccttgtcagcaactgagatatacttattattaatgttaatatcaattgcattatcagacgaatggatacgtcccgcttggaactcaacattaccagtattcagattaattgataggttactgcctttaattgtaccggtcgttatattattcgcattcaaattgattacgtttatatgcgcagcattgatagtacctgcagtaattttaccagcatctatgctttcaatcatggagttcttaatgattgcattatcaatgtaggtatccgccgtaatatgcagtttagtaccgtatatcttggttccttcaggggaaatattaattgcgttaataaccccattcttttcaacacgaagattaatccggtcattagtttgaagtatagcagaatatgcgtgctcaagttctgcattacttacattatcaggaacataggctgcagcagtagctccttgattgagcattgggcatatcatagcaacatggccaccaccatgaacacgaaacgaaagacaaacggtttcagttccagccggaggaaccacattttcaactttccttagttccagtccacgggtgtttttctgcgattccttatatccaatacgattacccttagtgtcgtaaaattcaacaataagtatcgcattatggccaatggtatcaacatttacataagcactagccgaccaaggggttgagatatcttgtccaataacaatctttcttgagaacaaattgtaccaagtattggtatccgtcgttactggtttattaatgcaaatgccttgatacccattaacccacgaccaagcaaaatccgacttataccaaatgtcagtcgtcccaccggtccaagactgtccattcagatagtcgtactgaaattgtgagttagttacaaaatttctggttccaaaggtatcaacttttcctacaacggaagttatctggttattcaattgggttaccttggactggtatacgtcattatccacttttccacgaactgttgtttgaatggaatcaatagtttgagagatacttgacaatgctgtgattgtcgcattgtctaatgggctagtagaatagtcagtcataactgatcctcgttcaagcttaggaccggcgacaattaacttattggtattgtcattggttcgttcaagtcgagggcacacgtccccatcgtcagtaactacaaatgtaacaaatactctctgccaggtttcatttaggctgacagttttagcaccaatatcagtattactggtattaacgttatcaattcctcggcaatataagttcgatttaccagtcccactttcgtacttagcataaattgagaaagtgtacgtttctccctttttgacagcccaggtctgagacaatccgtcccaatctttggtggtggaaactgcagtcatcccgttataaatttcaccagtttttgtccaataatcatatctgttccatattccattaggattgtcaaagtcacgagtgtcagtgtacaagtttgtgcccactgcgctattttgaatctgtgtttgaacagtcattaaagtgctattaaatgttgtagcacttgcttgcaattgactaatattatgcttgttagtggcattgtcagaacttagtgaatcaaagctagcgcccaaagacttgcttgttgcttgaagtgtgctaatatcggtgttctgcttgcctagagtattgttgactgtcgtaaactgagctttaaacccactggaatcagcttgaagatcattgatactggttgtatgtccatcaacggtattcttaacgcttgacaaagttccactaagactatcagaagttaaattaatctgattctgcgtccatgtttcagtagcgtaaccgttaaggtctttctgctcaattttcttggaaatatcagattgcataccgtccacagtttgtgaaagcttggataaagcagtaaccgtagctgtgtcttctggatttacagagaaatcggtggctactaaacctttttcaagttttggcgctgcaaactcataccgtgcatcatctacttttggcgctgccgacatttcgatacgtattgaatagttatagtccttagttgggtcgtattcaaagtccttaaacttgaaagaaacgactattcgcgcccactgaccctcttttaagctagttagttgcagaggcacaaaaccattttttgtagttgcagttgataaaaagtcgatataggcatatgacattcctgcaggatcttctccaactactctaaagtaaatagagtaggtaaaatcgtccgtggtattaatgacgtctcggtctaatagatctttataactgtatcgagcattgccccatgggcccccaacgtactctatatttgatccaagataagttcctcgatcctcagtccatttattgttctgagtataccaagacggtttcctcttctgtgtttgagaatccaataacaagttcgtccccacagcgctatcttggacttgtgtctgaacggtcatcatggtactgctgagttctgttgccgtttgacggagctggctaatatcattcttattagttgcattatcagtagtaagtgtattaaaccccgtggttaagtctttagacgtggcttgcaaggtactaatatcagtagtttgcttgccaagagtattattaacagtcgtaaactggctcttaaatgaacttgagtcagcctttaagtcatttatactggtcgtctgcccatcaaccgtactcttaacacttgacacagttgcgttaatcccatcagcagtagcgttaatcttgttttgtgcccaggcttcggtggcatatccattaaggtctttctgctcaattttcttggagatatcagctttcataccgtcaacagtttgagaaatattggacacagctgcgactgtggcattgtctaaggggttagtggagaaatcggttgctaatgatcctttttcaagtttcattctccggaatcggaatacagtcgttgagtcgaagttatatacttgccagctaatatagaatgcagttgcattcgcaggtatcgtgaacgtgtagttaacttttacaaacccagaggtattagtagctaggtccccagactcattaccactgtaattgttccatccactatttgactgatattgagatctaaaatgaacagaacccttgcttacataaaccttgccttgaatggtgtaagtttgtccaggctccaaaccgtacatttcatttgttaatggattaccgaaacgatagtacatttcgtaagaaccagatggcggagcagttatttggctatactcctttgttctagataagtcaccaagcacggatacgtacccagtaagcattttaacaggatgggttgcatcattatcatcgccagtattgagtaacaggtttgtgccgacagcgctattttgaacctgcgtttgaacagtttctaaagtgctactgacttctgtggcagtctgtttaagttgactaatgtcattcttgttagtcgtattgtcagttgttaacgtattgaacccggtcgttaactctttagatgtagcttgtaaagtaccaatgtcggtagtttgcttaccgagatcattattgactgtcgtaaactggctcttaaatgagctcgagtccgcctggaggtcattaatactggttgtctgaccatcgacagtactcttgatactggacatggttccgttaatcccatcagccgtcatcttaatctgattttgtgcccatgtttgagtagcgtaaccgtccaaatcagttttagtcagtttggcagctagaccattctgtaattcggcaatggtcatagtcgaaccgtcagttaaagtcttataactctgactaactgccccggcaatttgtttggcatctttagaatcagcggccgcagaagaagcctgtttaactgcatcactagcggcgctttgagcattaactgcactagttaaggcactatctgttttttgactaacttttccgaattccgaggctgtagagtttgctgtagcaactgcagcactagcgtcactttgagcgcctactgcttgacccagtgcttgattagctaatgcatttgtatcgtcgtacttggccgcaagctggtcagccttatcactggccgctttagctgcatctgtactagccttagcttccagttccacttggtcaacttttgctttcacttcttccccagtagagtccgacacagtaagtacccatttaccagttccatctgcctgacgctcgtaagtccacaattcaattttattaccgttctgcttgtaccagatatcgttaaatttagctccgtatggcggttcagttgtatctgtaccatagatatagttacccgaagcaccttgccgtccacctaagtcagcaacatattgtgatagctcgcctcgccaagcatagctactactagaggttgaggtctgatctgctttagaaacagcagacaaactgccatcaaacgtcatagtataaccattattaggcacgttgaacttgtttcctttagtatcctgtagtgttagccaatcgccagcttctattgcaggattgccaaaccaattcaaactgaaagggtagaaggtcaagctttgtaactgttgccatattgatgctaaacgatccattgtcatcaaattgttggtgagtttaatctgtgatcctgacgctgcccctacttgaagcgtgtttgtagtttcggtactctgacctgttgaatccgtagtagtcgttgtgacctcacactgaataccgccaattttgtatggtgcttcattttttgttaagccaccttgttcatattggctcgggtctaatgtataatctggctctgtaatcgtgcgaattgttaatttgccgtccctatcaaacgttgcaaatccagcataaaattgagcaatcatgccaattgcatttcgatacgtttgaccggtaatagcactcggtaagttaacttgtacaggcaaacgactaatgtcagttgtattgagtaacacgccagccaaatttgcaatttctgcaatcacactggtcattttcgcagggtaagttaacttagaagtgtaggtaccctccaatagacacatctggtcatatgccttaattgttgtctcatcgttgtttcggtccatttgaatgtcatctgatacgataaaaagaccaagcgagctatactcatagccattagatgtttttataccaatcttaggccataccgtcatgccgggtttaagtccttcaattaagtgcgaaaacttaattgtcacgctgttttcataattcgagccaataccaaacgtatctccagtgtagccacctgcgtcatatgaaatggatgcaatatctgtcgttttatagtcaatcttgttaattgtgacaactgcatccaacgtccgttcagttgccttccatgcagcgagggctaaatcagattgcttaatcattaattttcacccgcctactgttcaatgaaatccattgaaacattctgccaaatataatctgatgtcaatggattaagtgtataagtcggtgcagtccgatcaccaacataaaatgtcttggtcactactgcaccttcttgtgggtctaaataactgcaagaaaaaaactgtccagagacagcttttagtattgtactattctcagccaatgttagcggcccccattttaccgttagcttgcgtttgattgcgacacggtctcgatgcaaaagcccattcgcgtcacgtgatgcttttgcatcaatatcttggattgcaacttctagggactgtggtgctttaaccactgtcccaccaatcttcagtgaatatgtcaatcgtaatcatctcctatagtctcaacatgtttttaccattcttctgatttaccgcgttaatgcctttaatagcagcattaccgaacttctcatcaccaacttgcaacgtcaagttcacattgatcggttgattgttcatgctgccgccaacgtttgtcatttgtaagccctgtacaatcgcgttaacgatgcttgttccaagctcgttaatgccaccactattcatactctgtgtactcgtactacttggctgactagccagactgctcatatccatcgactgagttaaagctgcgggcatttgtaagccatcactgaacgtttgtcccatgaagcttagtgcctgcttaatcaattgcattgaccgtggaatgttagttaaaggtaaaaccatttccggcttattctgttcagccacttcgatcatttgatgagtatcaacaagaccgccgttagcaaaacggcggtgcccaatcggtccactgtgcaaccaatcaaatttaggcgtgccccaaatgactgtatgaccagcagcattgtaatagtctgagttattcagataagccaatacttggtcaaatgatgatctgaaattatgatgtccaggaaaagcaaatgcatcaaaggttgacttgacatactgtagtggtccacctgcaggattaccagctagcgagttcacatcagtaattgtctgcgtaatatttcgattcccggtctctgacttagccacttcaatgatatcgtgttgcatctttgaccaccgcgatttaggaactttagtcatctcgagtgcacgactaatcattgaatgagtgattgcaccaccatttggtccttcgctctcgccgtattctttgagaatcttaccgacccaacttttagcactatcaacactaaaatccaccatacttttagcaacatctagcggatagccacctaagccggtaaatttaacaaacttgttcatagcagctttcaatactttttcagggtgcgtgatatcgtcccaaatatcacttgccgtatctttcacaccatcggcaaaactgcctacactgtcccctataccactgaacaaatcaccaaaattcggcatgctaaagttgaaacttggcaaattgaagttaccaatacttgaaaagtcaaaatcaaagtctccaataccaccggcatagtgtggcaccattgctgttgctttacgagccgtttgtgccgcattgagaatttgagtacctctcggaagattgaccatcatattgcgaactgctgggaaaagacctgttcgtccatttggtaacttgtatgcttcacgatacttatcaccaacctgatcattaacgattgctggaccacctttatggcgaccaccagttgcaaatgacggaacactccagtggctcaatgactttgctttgctggaggcgcctacgtgattgagaatccatttaatgccatcgataacgccattaacggcttttccaatcgtaccaataattgcattagcaacatccgcagaacccttttttacagacttccaaccagatgaaagaccgccaccaattttaccgcctaaaccaccggcccattttgcaattgttttacccgtgccagttctaaacgaagcaacccaattacctaactgagtaccggctcttaacgcagctgttctagaactccccattccagaattagtcttcgagcctaaacttccagcccaactagagacagtcttacttgcgccagttctaaagttattaacccatgaacctaacttactacccgcattcttggctaatcgtttgccatcttcgactttagtattaacattactaccgatatttgatgcccattttcgaataccgacgattgcacctttagatttgctcgtaaactcagacgtccagttaccaatctttttacccgcttcttgagcggcctttttaccatcagaaactttcttatgaacaccgttgccaatattcgatgcccaagtgttaacagttcttttagcaccgccaacaaacccagtagtccaattaccaatattctttcctgcttgttggaaatccttcttagcattagttatatgggtcccaacctttttaccaacactcttagcccaatcggaggctttacccggtaatttcgatgcccatttaagaatattcttacctgtttttgtatctttaaggaaccaggaagcaatcgtgccaaccggattaataataaaaccaattattttagtccaatttttagagatccaatcgattgaatctccaaaccatttggttatattcttccacacagaattacaaaaatctctaaatttcttattatgtttgtatagcgcgacgaatccagcaactaatgccgcgatagccaataccactaatgctactggattcgcgtccataactgcattcaatgcagcttgaccaacagcagccagtttagaccacacagaccaactcttgagcgccttccaaccatctgctaatgcagcagcataatctgaccacttcatttttgcaagcgaccataatgtcttcacactgccaacggcttcttctaacttatcaattccagtaatacccttgaaaaagtctctgagaacatgccctttaccaccgataataaccgctttatcagctaaattccccagtagtcctattccattgcttaatcctgtcattgttactttgaatgcaaacatagttactaagactttcgccattgcttcaacggccgtatggtgtttatctacccaactggaaatcccacctaatgcatctgctaacttcttaagcatgccaacgataactccaccagtccactttgctaatggcttaaggaacgaatcccatatccatttaaaggctggctgtgaagcttgaataatgctgtgaaacaacttaagcgccgcagctaatgcatcgaagaacgttgggattaaattagtaatcgtgtatttggccaatggtaacaggatattttgatatccccaatccaggccgtcccatacatctttgactactggtctaatcgcttttagcaatccatcaatcgattgtagtaagggtgtgaaattaagcttagaagcccacttaatggttgctcctgtcatgtcgtttaacgcacccaacatgtcattaaccataccgagcagcgttttaaaaatagatgtaccaacgccaccatgttgccaagccttgtcaaattggccgccaagtgcactaacagtattaaagatgtttgtgaatatcttgtagagatttgatgcaattttctcacccgcaccactattccaagcattacgaaatgctaccgcaatgttattcaatactttgatgacctcattcagcatatttaaaatcgactgaatgagcttagtaccggtattaccatgggtccacgaattgtcgaacgctttagcaatatcaccaataattcgtgcaacattagtagctaatttaatcaggttcgcaaaaatacgttcgcctaaattgccgccattccacgcgttccggaaagaattcgcaatgtcgtggatcagtttcaatacattattcagcgaattgaaaatagtttggactagcttagtaccacgaccgccaccaccttcccatgcttgtgagaacgctttggcaatatcaccaataatgttaagcatgtctgctaacagctgtaagatagcttctactgtcttctgaccagtgccgttgtcccatacatgcataaacgatcgtccaacatcgctgagcgctcgttcaacctctttccaagcgtacttagcagcatccactactgatttacccttggcgtcccaagctgccttcattgggtcgaacagctcacttaaaattttttgcagttttttagctgcatcagttgcgctgttgaatggctgacctaatggtacgccgaaattgacaccatcatcaccagctccagcatcagtaccatccatcgattgcagtggcgtactttccggtgcgttttgtgttggcgttgaatctggtgccgtttgtgtttcctgcggagtaaaagtctcctttggctttttatcataagagtagtcttcatcatcattgctcttatcaagaacattcagttcatcaaagcccattaaagactgcatgagttctttgttctttttcttggttgcttccatggaagcctgagaacgtttattggcggcttcaattgccgcgttagcagcacgaactttggcagcaccttgtttgttcgactccgcaatttgtcgattagcctcacgaactgaggctgcttgagcctgatttttcgcccgaatttgagcatttgcttcacgaactgatttagcctgagccgcattttgctttcgaatctcttcgtttgccttcttaacagaagcagaagctttgctagaagcggcagccgtgtcatttagtgccttagattgctcataaagtccctgagcaccttgccgcgccttggaatagctcatacccgttagtgctgatgtgaactgtgccaaccatgatgtcgctttagataatgacgacattaatgcattgacagccggaagtacaaagttgtaaatcggatagaatgctgtcagtaaattgaccttgatttgattcagactacttgcaaactgcgcgttcgtcttaaatgctgtcatcatcccagtagcaagttgcgtcaagccttggtacagcaacccaaatacgattaattgtgatgggaggtatctcaactgctgggcaatgccgcccagggccccgctggtccgtctagcactagaagaggctttgttcattgaagaactactactatttccaaaattgcgtatccgacttgttgcaccttgaataccgttgctaatgcgactgaaccaattagaaggccccttaccggaacctgatgctttattcattgcgctacttgccgcactgccgaaacgattatacgaacctgccgctcgtgtagcagccgtcccggattcacccatctcagtattgagcttaccaattacagatttaagttcgtcaccacgatcagaaacataagcatagctcttgttcagactatcattggaattaatgagcttgttcatcttatcgcgtgtgctcatgatgctcttttcaagtgccgtgctttgcttggtcagccggtcgctggcacccatcgtcttcatagaatcctgaacatcacgataggagccctgcaacgcctttaactgacgccgataggtttcaattttaacttcgttttgatccatagctttagaaatctgccgcagtgagtccggcaccgctttaaattcttgtcgcattgattgggctagagctttagattggttttgataacgcgtcatctgagcttgagcggacgcaacctgattatcaattttaattccttgcgtcccattctgttgagcggtattcaaggacgttttttgattcattaagtcacgcatcttggcttgagcagctcgggcctgatccatctttgcattgatatcactcagcatggcctgtaagtcctgttttaccttaacccggctaccggtaaacatcttgccagcattctggttgaccttgctagccccggtagatgtcgagctactcattcgttcgaatgcagttttgatagtctcgttcaaaccggacaactggtcttgcaacttttgaacacctttagaaacatccatcgactgctcggtcttgtccataccggacttcgcactatcagcggtcttccccatcaatttatcaatcatcggttgaaccttggcaaattgttgttccatttgttcagtgttcactttgaatagcagttcaatttcttcaagttccacgttgtttcccccttcctatgtagtttttttgaattttcgggctgtcttaatcttttgcgattgctgcattagaagcaactggtcccgtttccattcaggaacagaatccgacgatgtactagtcgctgttttgataaatggataagcctcttcaaccgatggcattttgctagggtcgttcaaagcaaatgccatcatctcagcttgcttgtgatccattaccgctctcattcgcatatcatctatacggttacgattatttgcgattacttgaaccatgagttcaccaaaatcaagttcccaaaagtggtcagaatcaatcccagattgcacggccaatgggtaaatagcacttagcaactcagaaacagtctggtaattattgcttaaagtgtcgtctcggtcgttggttcgttgtccagagtgacttccgattccgtattcgtcttcgaagccgaagctgtcttgccgaaaaaaccagattcctggaataagtctgttagcactgtaaataaatccattggggcatgaccttcatcaaaatatttttcaaaggcagcaaaaatgtcgttatcagtaacgccgtgagtttggttcgaaccttgcaatacgataagcatttcattcaatggtggcaatttcattccgccatccgcactcataaagagcgacatcatagatttacccaagcgtttttcaatattcaaaatatcacggcctgttaactttaattcaagttgtaatccacccatttcaaacttcttagttgctttctttactgtcataacgtagttcctccatttttattattcgtctcatatcagcctgctggcctactcgtctcttactcaagttaattattatctggataaaatgtgacggttctaagctccggcgctactactggccgttgcaaagtccggtccgtccgatacgataatcgaaatcgtgtattcaagtgctccgttgacagcaacgttacccattttgacggtatatgagccagtgaaagaagctgtcatcccatcaggataagtgaccttccatttatattgcttattgtcaccattgtgcgttaaagccgttgcaaagttgctgcccttgtacacaaaggtaaaagctaacgttgatgtattttcaatcccaggaactgacttctttttcgtatctgataaatcagtcacatcaatattttctgggtctgaacccatgtcaggaacggtcttaataccgccaatttcatcaaacttagtgccatccactgacatttcaagcttggtccctgttccggcaagcccggcactagcgtctgcagcaaatcgttgtaaatcaaatactgttaaattctttttcaatttcaatcatcctttcaactttcaaatacgcggtgactagtgttatcaacaacaccagtaaatcgtaatacagtgcgattcacacccgctaaattgctatcaccaacatcgcttgaaaagcccatatcaccaaatgatgacatgagcttattcgtgattgccgttgtgctaccttcttttaagaagaggtcaattgtgatcgtccattccgtttgcaactcttgctgattagcatcacgaaaataggctttatgtgccgtgttgtatacagcgattgggaacaccgttaaattatctgggtacgtggttgagacctgtttaatttccggtatagccgttagtgcttgatacactactgacttcacattaataattaccatcaactaccccctaatttgttatggagtgcggcctccacactctgcttaatcatctctggtgcctcacgactggcttgtttgacggcgggggttaaaaactggcgggcgggttgaccgcttgtccgatagaatgtgtgtccgtcgatttcgattttaggcataccatacagttcactcaggtcagtatcaacgtcatcagcaggaatgaaccaaggcgtttgcctgtacactggtgtaaatccatcgggtaaatctttttgcgactcctcacccactcgtccagtaccgagctcacgaaatagcgctactgggtcatcggaccagacacgaccgacaatcttgccatcactatcgacaacctcatatttaatacttcgagccaactcaccatttccatacttaacgctggattgaagttctttgactgcatagccctctgctttctcaacaacatcaaaagtagcatcccagatggcatcgtgaaccacactgggcatttttttgagctgagctttcagcttatcactgccacgccattcaacttcagccatccttttcgcctcgtttacgttgctctaaagtgatatttttatgggtgctgaatgtttgtatcgaattgataacgtaatctggctcgctatctttagtaacattgacacaaacaccccaattttcttgttgaccttcattgatctgattaccttgatacttaccagatttaatgtacttaaggtctttgccccagatttgcgcattcactgaaccgccagcagcttgaatgttcatcctcactgcaattggattgctccatcccgccgtaatgacattaccttcatcatcgtgacctgattgttgttgtcgtaaataaacagttgtcaggtctgttggtctaaggcgcattagaatcgcctcgttttcgcgactcggtaaggtgctagcgcggttttaattatgttaggtagtcccagttcaaacgattgagaaacgccgccttctgaccgcgatgcttcgccttctgttccttgctcgttgtacatgataatggcaagccgttttgcctgaattagaatcggtgtcgagagtgaagaccgggtataatccaagcacgtttgaacagcatcatcaaagatgtcatcaaccaccgcagcatccggcgtgtctttctcaacacctaatcgcgtatatagtcttgtcaattgtcccgccttatctggtgggcttggtttagccatacgatcatcctctattcttcgtcgtctgtttctaactgagcattatcggcagttttctcgtccttctgcttatcaagacaaacaaaaagctcatcattgaacgcgtcttgcgtaatgctgagctcatcaccttttttataccgagtatctttataccgaattgggtaatctttaacgcgaaccttcattatcaatcacctctaggctaaaacctgagcttgaaatacctcatccgccgcggcaaacgctggaagcgcaactgctgaggctttttcccaagtcccaattggatcattagtttcggtataaatcatatcgtaaacattacccacagcgttaatttgcgctgggccactgaattgtgctaactcttctggagttggtccaaacactttattaccaatcgggtcatcgttcattaagacaagtcgattttctgggaagtaacgactcttggtaatcttgccatcttttccgacttgggtatatttttgatcataagtccgaaaaattggtaaaccttgtgcctgcatgaaggtgtcaaagtcggcttgtccaagtgcccgagtagagttaccatacacggcttgtagaactttggtattagtcgtaatcaatcgataaatcttccgactagttagcgcccgggttggtgtaatatccatcttatcgcaccagcgcgtaatatcaccaaggatatccgcgtcgccgttatcccatgtagcagctccagtcaaagcttcctgatgttcagtcggaacttgataatcaagttggacagcaagtttaccactttcatctggcaaaatagtcttacctgttgctaaaacgtccatagcggtcttttcaattcgtgctaaaacgccttgattgagcacatcaaagtcgttataaacatgttgttgcaagtagctagcttctgcgggcgtccgcggattgagcatcgcatacaaatctttttctttaatctgcatcttgcgcttaatcaaagccagttcgatggcagcgcccgaggcagaccgactgccaatttcggcttcactatcaaaagccgcataggatgcaatcactggaattcgattttgacgtttcaagatatcaacagttagtgagttgactttgattgctgggaatagttcatcaccttgcatcgctggatactgccgattcaatgaaaaatcgattaaatcatgttgcgtgaataaatctgaaatttgagccatttgttttctcctcctttaattaggcttgtgatttggcggcggcgtccgtatcagtgaaagtaatcttctttaatgccgtgatagcctcagctgttggcgccactggtaagcgttggccaaataaatagccttcaacaatcacgccaaccatttgagggccacgtgtaacgtccacttcgttaatcgtgattccttccgccttagcgtcattagttggataaatcgtgccggctggaataactttatgtccaaaagcatccgtcttcaccgcgtaactggtgtcatcaacctgccgtgagaatgatacgaacttttcagatgccatgaaattcttttgttctactgttcctttatcaaatacataagccataatctagtacctccctattttgtcgcccataaactggactttgctggcttttgcgagttatttaatttttcagctgctgttgcaccttcagatttatttgcggatgtatcagcacccggcaatgtggtcccactgcttgcgattcgcttatcgattgcttgctgtaaactctctgtaaatgccttgctgattgcagtgtaagccgcttcaatgcctttatcatctgctaaaacatcatcaccaaaagccgcaatcagtgctgtcggcaaatcgtctgcacccagtcgagccgtcactttggctttattttcaacaatagttccatgacgctgtgattcagcaagttgcttggttaattggtctttatcatagttggccttttccaggtcagtcatcttgtcgtaatctttttgctgctgagcttcactagcctgtttttcatcatgtgttttaattgccgaagcaatcagcttatcaacacttgattgccagtccttttcactagcaaacgatttaaacggcgtatctgcctgattgtcttggtcagagtcgtcattgttgctattttgattggcgtcggttgtgttaggcgtgctatcagccgtctgattgccaccttcatccccgccagttccattatcaccgtcagcaaacatctgtaaattcatctttagtttgagtagctttttcataattaaattcctccacgcccacgcatttccgataactcaggccacaaaaaaagcaccccgtgcattactctaagagccccacacattgtgctaaattgaccgtggcgtcattatcagacccacgcatgctatttagtttgagtagtttagagacgtgctcaggtcatccatgctaatcctgatggaacattgtcgaaaggatcatcgtggcggtttgtattgctgttacttgatcatatcctttattaagtgcttcctcataacatgttagaaatgcatccgtcatgagcttaaagccttgctccgtgtcagcgtcaaacgtcaagcccttcattgccatctcggtgtaacgcattaaatccgaattatctttactcatcgtgttctcctcgtcgtactaaaaaacgcccaatcaaaatgattgaacgccctacattgcaacaataacgatatcttgccattggtcacggattttcttgccatcaattacataatcaagaatctcatcaacgtcgtcagtatctttgaagtgataatcaaaatcaccattatctttagaaatgatacgtttgccctcactgtcaaagccaatgtaccactcaacatcattgattttgatttgaacctccatacgaacatctaacgcaaatcgaagttgctccaaagactctaagtgatccgaatcagcttttactcgtcttaccaccatctttattcacaatcctttctgcaatcgttaatttccgcccaggttcttcacgccggggaacaatcttgccatttttctttgtaacgcgtaaccagggatgcgcgtgtggcacaatcgtgtgcattttagcattaccatggtcggtaaaattaatgtccagccgggcctttcctgtcttaccataatatcttcgtgtaactagttgtccatcgacataacggtcaaaaactgagttggcttcctgttgatacggaacaccgtgcacttcaccaaaattgtgtacattgttcaacgcaaattgttcgcgccgaacctcgcgcgctactttcaacaggttctgataactatcactgtcattatacttcatcgtttgaaaatcttcgaatgtttcgggtacgttatctccacctaaaatccgtttgtattcatcatactgggtagtatcataccgacgattgccaacccgattatctaaactatcgaaagcctgcggaccatgctttaagattactgcctggcgccaatcctgataagtagcatccggcttcagcttgagcttttcaccagtaattggatcattcgccgtccgttgcatcatgtactggctatctgacaaatagatgattgcgacagttcggcaaaatggatgtaacggcggaaaattaacattcacttccgcttcatctacgttaaatacacggccgtcaatactacgacagatttttgaagtccgcatatccagcacggcaaccagttggtactttttaaccccgcgtcgtttccattcattgagcttcgtttgattatgaaagtagttggcttctgttctaatcaatcgtcgcgtattgtaactgctagttccaaactccttagctaaagcttgtaccatgtcacgctcacgcataccactcatctgctgagccgtgaatagttcactaagtcggtcggctagttggtccgtgttatgccaaatccgtttagagtagttcttgcctttaaacggcgcatctaatgtagccttaacgtacttccctgacaactctttaaaccgtgttattggttcgtctgggttcactttaactgttaccatctctttacccgttttagggtcaaagatagttctagtgtgcattttaggctgactatcagcgctcacgcccggaagaatgacgtctttatcaaagccacctataatactctcgttagttgcctgatcaagtgcttcttgaattaccttggtataaaggtccgtggacttctcaatctcaacagatgccgcttgtttcaccgcaatgtagctcttagccttgagctcttccaatctggtaatacggcccttagctgccatctgtgataagtagttagtcacttgcttctttgactccttatcactgacattatcagccagggcccgtaacgttactaactcagtcggactaacattggtgtttaaaatctgttgtgcctcggcctccgtcgctttaccgcccgtaaaatatcgtttgtatatctgtgatacctcaccagtcaaatagttctgagcacgcatgtacgcccttgcaatgatagtcgcttgtttggttgcagcatcatgtgatttctgttcgctctgaacggctcgcagttgccagtaacttaacttgcgtttgtcatccgccactcctacacctccgagcttataaaatcaaatacagcaaaattaaaatgcctgtaattggcttccatccaagcgaaactaatccaagcattttaattatcacgatcacaaatacaccaatcgttttaatgattttattcaattctgagttaattacccttcaccaccacttgcaaattctgaggatattgtgctgaaatatcttgtagtccgtgtaataaggtctcacacagaactttgttatcagcactgggctcaatcaatccaataaacaagccaccattttctttaatagtggcgttagatagctcattagtgatggcttggccaagcaccgaaacagcagcacaaactagatcatggcccttaatagcactattcgcgtggcccgttatctgataactcactacctgctttttgtttaattgaaacgttgccagaatcatccgcagttacctcctcgttatctgtggcaggctcgccgcccatagctttctgctgtagcttgagtgctttctccttttcctgatccagcatcttaattaactcttgtgggtcatttgtcccaggcaaccacccgagtgataccaattgcggaatgacaccttcagcattcttgatattgctaatgacatccgccatgttgactggaatatcaggaacaatattaattgtcgctccggaggcatctactgactggcctttaaacgctaaaatgttctgcatcagttgtagacgctggcgaattccacgtgttaagtatcgctgcttagtcgctaacaattggagtaaaccgaacagcttgtatttcatagcttcaccgctaatcgtccctgcaaagttttcgtcattcatgttagggacgtaagacgtttgatgaatgtcatccttaatcgacttaacaagtacttgtagctgtgattcgtcaaagctcttggtcaaccattcaacgctagcaccctggtcgcctttaccaggcgcttctagaataccgtccttcaagttagctccttcaccgtcctcgccctcatctagggtaaagccatagactaccagcaaggcatccacgaagttctttttatcggtgatacggtctgactgtaattcgttataggcgttgattaggctaatcgtttgctcaaaatcaccttgacgctcttcgttattacgatactcaataagtgggacaccattaaaataatgttgaatggccttaggtttgcttgccaaattagcatctgatagcactcgtcctgtcttggttcgatactgaataatccagtgggccgtatagacagtaatcaaataacccttagcattaccaagcaggtccttcttttccacgtagtaaataccaaacagcggatttttatccaacgtgtcatccgttaccagcacacagccgcgcggatcaattttttcaattgccaactcggtagttgcgtctgacacatttttgatgtatagcagctcataggcacacccaaacacgcttaaatctttctccatctccgtattatgcgaatcaatatccatttggtcctgagcatccgtaatggctttaatatccttaccgttcgccggtgaaatggatatcggattaccagttgtaaagccggtaatcatgtcagtaatgtatttggcgtggttcgtcattaccttttcatctgcacgatccaacttagccgccatctcaagatttcggcttaagatgtgctgattaccctcatagtagtgttccagcatgttataacggtcaatacgtttctgttgttgattgatagcatagttaattacatcaaagctagggttttcaatattgccagccaattcacggtcaatcgcaacgttggacccgcgcttcttgttcaaatcatactgcatccgctcacctcctatcctcttaatccctttggcttcttaattgtccgtgccttgagccgttcgtgtgtgttatagacggcataccgtaacgcgtccattacgtcatcgttaagcttgacgggtaagcccgtagcctcatcccagacatactgatagatttcatctaagaaggcatcaatcgcttctttgataacaaaaaagtggccttgcttcatgcacttagccaccgactcgattcctgataaaaccgattttttagcattgaacgccttgagcccttcacgttggaagcgtgcaacgtgttcgggtctcgcgctatcagcccaaaacttaacatttcggccatagcgatgctgaatatcttttgcaatctctacccagtaatcaatctcttcaaactgacgtgtatgttcttcaatcaaataagtattgccaactcgatcatcagccattacaacaatcgttcctttatgttcatagccccagtcgactcccgcatagtaagttaagtctgctggcaattgagcccgtggaataatcatttcgtccttattaaaatctttatacaccataccttcaccagatacccatagaccgagtattgcacggtcgtaaaacattccggacggcgtacccgctttttgatgttcaacgtattgtgggggcaaaaaggtattatcatcgattgtaaaatggaaactaacgattcctgctttaggatcatcgttatcaatatagctggctttcaagtagtgagtcggaacgtctgggttcgtatcgcaaataattcgcgcaccttgtgctgagcaccgattaaggatttcattgaatacctcttcattagcaaggctagcttcgttaatatacgccccaaacgaggtcatcccacgaatggcacccagccctgcaatggacccggtaaacgtctgcacaatcttcacgccaaacagtgtgaaagagttatgtttgtcaaattgaaatttaatgtcatatttattcgtcagttcctgtaatacgttgttttgtagcgacttgcttgaataccccgctaaaatgtacattggttccttgacccctaatttgtcagcaacctgacgaacacgccgcagttccatcaagaaggcgtcattatcaacgacagttttaccagaccgaacagcaccatagtttatcagtagtcgccagtccgtccgccgcaaggttttcagcacttgaacttgtttcggcgtatatagctcactaattgccatcgctatcaccacctaggacgtcatccaatttatccagatattcagaaacttttgcttcagtactatcggttgaggcattcataatgcgagctttagcctccgcaatatccgcgtcagctttaagcttgcgaatctgttgttcaacaagcttattgttatccggataacgcttcagtatttctttagtagcgcttatccgtgttttcaagtcagcttctttgtgtttctcatacacaccgtcagcagtgccaatataaaccgtttctttagtttcgcctctagcgatactagtaagcaactcaacggcttctgtggcgtccataatacgcttggaagctatctcggccattcgctcatcgatgtaagatttaattccaacattttccaacaatttgctagattgtgcctttgcatagttgcgcgaataaccagcttcaatagcagcttgataagcatttccagacttgatatactcatcggcaaacttttgctgtttgggcgttaactttcgtgtcattacataccaccacacctccgtctaattggaattagtcatcgttattcgactacgacccagtcatcagctagcatatcagtttgactagctaaccatggaactcgatccataggtgcattcggattgttcgtgcgtagcccagtcgtgtcaatataaatgaaatcgtgagtcataacctcattaaaacgattattgggagtgttcaaagattctccctttttcaatttaatgaagatgcctttgccgttccaacctttacgtgcaacacaattacctcgttttaattcttcaagcgcttctccaaaattcataattgcttcctccttatttttatccaaactaaaagcgccatgcttatttgcacgacgcttcttatccttgcaccacttatctagccgagcatcggcctgcacccattcaggcggctcatacccgtatttacttcttatcattttcgccatgaggcacctcgtcatcgatcagcttagctagccgtctcaactcatcaaagctaattgacattgctacactgtctccaccaacatcatcggtagccaataagaaaccacttgatggattaattgccaggcttagttcctcaccaaaaccatcttgataattaaagcttttttgcattgtgctacctcctaatcgtatgtactaaaaaagcctgacgccagccaggcctatgtattgttgtctcataagatggcgatcccgttattcaacaatacaatttaatatcatactatattcaacattatttgagttgcaatacacactatttactttactaaaaagagcccaactaaatgtcaggctcctaaacacagttgttatcagaaaaacgattatagtttttgcaaccatgtttgattatgttaccacagcgcacatgtttccgcatgtaatttggtggccagattaattgcgccaattatgtgcttggtagggatttgcaccctacatgacgtgtggacatactggttgtcaaccaacacccgtttctcgcgcctaactatgcgtctacctattccgccacaagcacgttccgctttaagcttaacggcaactatatcgctggtaggattcgaacctacattccattgtggcttaccaattagcccacagcgatactcgcattcaacggccgacgttaaacacgaagactaatgccggcggcagagaggagcgcatcaccccttataaatccgccggctacacagatagctggatttgaaccaacatagacggttttggagaccgccatcttgccaattagatcatatctgcttaatagacgggccatcatatcaacttaatcaaggaggcaacacaaactgtacatctgtgcccgtctaacgtagcctgctggactcgaaccagcgacaacctgattaacagtcaggtgctctaccaactgagctaaggccacaataataatcaattagagctatcagaaaaacgtttatttgtcgccctaaccaattatcgataatactaatttaccaccaatttattgctatgaagtccggcttgagttcggaaaaagttcggttaaagtccggtttgagttcggttttgataaatattcaagtcttctaggtaatagctctgtgcaaactgtagcattgccaatggcttccagcggtcaaaatactgcgtcttactgtagccaatatccatgtagcacatcgtgtcactgtaaccttgtaaatatagccgatctaatatctcctggcactcatgatcacaccgagccatggcctgaatagtctgtcggacaatctgctctgcatacaggcggcgcgtaatccgatcctcggccgaattaccagctggggccgacttaggcatgccatccatgctaggcgatttaagatcagctacagaatggccggacgctcgaactgcttgcggtaacttcttatccaggaaccgccgcacctgtttaattgttttctcttggtcaattggtggaaaaatttcatccgaaataacttgctgttcgcccatcatgcgcccctccgctttcgtatgctataattaacttattcggaattagttgtagcgcggtcagcgatggcagcgctttttatatgttatacttacaacggtcattcgagtggtcctgtgactagtcgccttaatgggcggctttttgtttgcttcggcgtgttccttcattcgccggtgcttccgtttaatcgttgaacgcttcttagtgtgcttaggcatcttcgtcctccgtaatttcatctatttctactcgcggatttcgtttatcaactgcaaattcgtcctgaaatcccgtgatatgctttcgattgtcgttgcctaaaagcccagccttcataaagccgtcaagcacaaactttttagcaaacgcgatattgtccgcatcttttcggttgttctttgtgtaccacgtaaatttaagcttgcaaggccaattaaattcaactccagaattatgactagcccgcgcatatacactacataaggccgtgtaccgcttctttaggttagctgccgcataccgattggcccgttcagccttgatgtactcatttaagctaggtagttcgcccttaatcacgactttgctcatactttcggcacccggctaatgtagtagccacagacaatgccatttgagtagcttgcttgccttatcgatctagctggggcgttgatcttatcacctagcaaatcaactgtttgtccagtaataatttcgttgggattgtcgtacttttcagcacgccagtagccgttccgcaacggcaaactgtacttgtgcactagatagctaacctgctgactaatatagccagtctcatcggtcaacgcccttatcgtatggttaccatcacgatgagcacggcgaatatctctaatttgctcacgttcctcagcttggggatctggtaacatactagctaagtaagcttcatcactgcgtaccttagtcccaggcttaaccagtctaattgggaacggccattcaccagatttgtagttatgttgcgcgagcttaaacatttccggttcgggtcccattgctagtgggtgatcgatatcgggcctgtcagcattaattactagcacctgtgtttcagtcatgcgctcacccctctttgaccattgacttcgatttcaaaaatttattagcaaaatactgctgccccttgcccgtaattaggggcgtaaagcgtgtctttgaaccatggttagtggtgatcacggtttctctcacttccatgattcccagctccatcgctcgttgggtcggtgagttgtaacgtttccccatcgctattaggtagccatgagttcttaaccaatcgaacaagcggttttgaccagtcttaataccgcgctggcgtaataccttagcgaaattaccaacgctgatagaatcgtctgagcctgaaactgcttggcctaatctagctggcccttgcaactgttcattctccagtttcagctgctcgttttccctcatcagaaaactatatccacgtttgacaacctccattgggctgttccacttatcttcaatagtgataaaataacggcggtaaatttgcccttgcggtgtttgcgacatcatggacaactctttcgccatgttaacggttaatgcataatcttgaagctcacgtttggcgccgttatttacaaccgtaactccggttacacttgtgaaatcaatgccctcgacaaacatgctaaagttttgatcaacccatttactaaatcgggttgttaattccagacctttgtgtagatcccgggcagacaccaactgccgtccatctttttcagtgattttaatcaattcattcatgcgctcacctccgtttgcaattcttgtctagcttgctctaaatcaataaaatactcggctggcttaccccaacattgggtcaaatcaaaatttaagccatcccgctgatattcaataattaaaacctcgagtgcaaatagcttgtactcatgagcgcacacctcatcttgcgcgctaccgccagccttcagatgccgcttcatacgctgcttagtccaatgcaacgcggccggttcataggcatggttagcggctaaattgactaattgattaccccaattcatttagcttcctcctgactgttcatgagcgctagaaaatcatcgtcactcatatcgtcctgctggttatcacttgaatttggcttagaatccgcctgagaagcgccgttttgcatccactttggcgtaacttctttacggcgtggttttgaatagccactaggttttctttcgctcttcatgcggtcgtcatgattagcagcagcctttttagcctgctctaacgtcgtaatattttgtttcttccaacccgcaacaattgcacgaacgtatttcaaacatgcattagatccaatctgatgttctccagcaacccaaattgcataggcaatcacctcaggcttgaactcttccagccattcatcaatctcaggtcgggcaataccatttggaaatccccacaggttggtccaatcgttaatgacctgctcgcgcgtgacacccgcgtcatcatcataagagtcagtatcagtcaagtcagggtcagtactagtaagttctttatgttctactggttgacctccaccttgcccaaccggttgacctactttatctaaaccagttggcctacttttatgacttgtagttgggttactggttgggtaaccagctgacctactatataaattaataatgcgatattcaggtggtttaacatttttcttgcctctaacgtatttaattagtcctagttgcactaatgagttgcgtgctttatcgaggccgggttcggatagtcctgtcagactgagtaatgccgaatttttcatgcgaaactgaacgtccaacttgccttcatcgttcgcatagtctaataactcgcgatacagattattttggccgttagagacactcgcttcatacattttaaaattgcggtacgctcgtcgttgcttgaagtaatccaaattcgtccctcctttactaatgggcctttcacccgttcggtggattcagtcactgctgcattcaagccaattcgaatgtttatttcttatcaaatgccgctagcaacccttgtagctggctcttagcatcctctgcttgtgctactgttaaattcttccaatcgtcgtcactgcctttccagtcaggaacgatctgctgcaatacttcgttggctgttgacatcggactgcctgactgtgtcttagtggccaagtctccagctaggtttgcaatatcacgagtttgttgtgacgtcgcgatcatttcgcccgtgtcctccgacgccggttgagcatcttctttaggtgcttggtctactgctggcttacccttaagtaagagttcagcagctgtcttaaattcggccttcttggcgttttcagcgagccattcgatatagcttcgattttcgttcataactttgcccatggtcttgcccttatttttaccgaagttcagtttcaaattgaaggcttcatcgtacgtcatggtttcggtattctcacgctggttgaattgctgcatgtcttcgacatcttgcgtaaagacatttgataaactagcgatggtcagtgtggcatcaacttgagctcgcttttttgccatcttcaataccgtgtttttcattgaaaagccatcacgagaaacgtacttactctcttttgtatttgccgaccctaatccctcagttaactgcataccgctcttgtatagcacgcacttgacggtgtagtcgaaataacccgactcgtagtcctcaactttatcgataacgttgtattcgctggtcacgcccatcaacatttgaattttttcggcacccggtttaaggagcgtcggcttctgtgtaccagggacgaccccaaaatcttgaccatcttttagttgatgttgaaccatagtttggaaattagagatagcctgtagttcgctagccatcttgttttgatcagtacccatgattagggatagactgttcgtttgattttctgcttttgcgattgcttcactcatatcggttcctcctagtatttaaacgtgaccttctcagttgccggtttttcagtaataccagcgataatctcgccatcttccatgacaaacttgtcaccaaccatgcgaccagctttttttaaatcgactttatcaatagattccttgaccttgatatattggctcatgccctgattacgaagtgagtttaaaaccatcttttcgtcatacgccaacccagccgggttcttacgagttgatacacggccattaggggtatcgattttgaatttcttatcgactaaccgttgatcacgtaaatagtcggtcagtagcccttcgaagtactcgcggttggcttggttcttatcaagctcccggtcgcgccatgcaattgcctggtcaatattgttcttcgcaacttggccaatttcatcatcatgcgcttggatagccttgagcttctttaacgcccagtcagctttctccaatgagtcaattttgaagccttcgttttcacgttctgtcaccgttctaagttcttcttttaacattgcatccatgattgaaatcctcctatttaataatcagcaatgacgccactttcaatcagctcttcctcagtaggcacatcatcacgccaaccttctgcagcttcttcttggtcaaccagccagctatcgtagccgttcatttcgcccacctccgcgctaaacgttgtcttagtgactgtttcggagtacaatagaactcgaaaataaatttattaaacgtcttagctgcacgggtactaccaatactcgagcagcttttttcgtactcaaatttaggctttggcgatactttgcgtacttccaattcgttcaacctccttaaacgtgttaaaaagattattcaattcttcaattgtgatttgcttgtaaagcacatttccaatcctgaacgtgaacttcatcgtcttcatctccttaaattccaaaccaactagcaacttcatgacgtttgaaccacaatgcagttaatgcgcagcctactaatgctccttcaatcattgcgatgcctcctatccatttttccgattaactttatcgatgacttcttgcaatttatccatcgagatgccagcatactcagctttcttagctaaatcagttatctcggcgctaatctcttcagcgtattcacgtggataacgttcaatgactagctgctgcgctggtgtccgatcgtttggattaattgcaatagcattctcaaactcagcttccattgcctctcgttcttgctgctctttcttctgacgcattagggctgagaacatatcaccctttagacgcctgtcattctggaatgacagcactccgaaattctcgcgagcaccagaatagctaagccaaaaatcgttaattacatttgctaacgacttcctgatttgtggatcagtgcttcttgatccactcttcaaccgggacaattgtccgggagaaacatgcgtcctatctgcaatctgctgctgtgttagtgttttatctctacctaatgccaatgacaattgctctgcaaacctgtttttcatacctacacctctgtattttggaaagggctttatatggcctttccgtgtaattcacttataatttagttagtcgggatggcttaatagataatccatcatctcagctgctggaatctgccagccgttatgggtattcacataatcaatgaagccaccctgttcaacatccaaatcatggcgatgcttggttaaatatcgtgaggctcgttcggttgatttagttccgtatttatacttggccagatctttaagcttccaagtacgaataccacgttgtgcttgcttccaggcttggaacctctcgtattcttcttcgctaatgaattggaagccctttggagcctcatgccgaatcaatatcgtatctgacatgttcgcacctcctaatatgaaactgacataagttggctagcttgctcgttatactcggccgttactgctcgaaattcagcatctagtgctttatcgcttagtgcctcaaacattactcttggtgtttctggcttaacctttgcaagtgcattaattaatgtagttcgtgatagatgtgtcattttgccgcctccttatttactcgtattgtgtactttatcttcaaaaaaataagtccatttaacacgtttttttttcgatatatcattcattcttacagccattttcttagctctaccaacacttggtgttctatgcccttgttcgtaagacgctaaagttgtctctggcatatcgagaaattcagcagcctttttttgcgttagtccgttgatgtctctccactcttttaaccaatgacgcatgttaacacctcctaactaagtaatacgtttcgcgtacctttgatgcttactaatataatacaattcgcgtacttagtcaacacatgaatactctaaacgagtattttttgtatttttgtacaaaatacgcattatgcgtagtaatcttataattaacgaaggaggcctatcaatgtttgctgaacgccttaaagaattacgaaaaaaagaagctggtctaacgcaagagagattagcaatgcaattaggcatggccaaaacaacactggcttcctatgaacaaggaaaacgacagccagatcttgaaacactttctaaaattgcagatcgtttttccgtgacaactgactacttgcttggaaaaaatggcacgccaaaatgggcaaccaagaaagataccattgacctgaaggattttcttgaagcaaatgagggttcgatgacctatgggggtgaagatcttactgaagaagaaaaacaacaagtgcgtgtggcaatggcaacaatattctggaaacgccacaagcatgattaggagttgtacttatggatagagtaaaagatattgttaaagctattgtcaatcgttatcacacagcggacccgtttgtaattgcggaaaagcttaacatacaagtggaatggtgtgattttggggcaatgcctctgggtaaaaatgcttatgacaaccaagagcctatcatactactcaataattctattaaacacacgcctacacagtatttcatactcggtcacgaactaggacacgttatattccatgaggggctgattgggtactacacttccgttaaacatggacattctaagtttgaacgtgaagctgatgaattttcagttggattgatgggaatgttgtttattgaggagaatggccatattccctattcatacagagaactgtcctatcaatacggggtaccattcgacggagattagtataaattaatttggaggaattatggaaacttttgccgagataatgttcttcatctcattgttgatatttatatattttatatgtcggggaattttcaaacttattaaaggagctagctcaaaacaatcttttaaatacggcttgattgctctcgctgcatcttttctatttgttgttgtaggattgatagctaatccagttaaaaacacagcaagcagtaaggacacgatagcacactcgaaaaaaaccagtacgtcaacgattgaaagtgccgataaaaattctaacaaaaagcattcgaacaaatcaagcagcaaaagaagtaattcgaagaaggctgcctcaaaaaaaacaagtagcatcaaaaagaagtcttccaagaataatagtgacactaagaagactgtagctaaaaaagcttcaagcgaaaataaagctagcgctaaaaaaacaaagaaaaaagtatacagttttaataaaattaagcttggcatgacaaagtcacaagtaatttccattatggggaagcccacagacgagagctcaagtacgcttatgtatggatctgatgacttagattttgaaaatgataaattgtttgatggatctcctgataaaattcataaagctgctataaaaaaagataaggctgaagctaaggaatctagcaagaaaagagtaaacgaaggtgaactaaaatcatttgctaaggtttttgggcaaaaagacgtcgaaactttacaaaaatacgttggctctgcatattcgtctatagaaacttcacagggaatggcttatgggtggaaaaccgattacggtatgctttacagattagatgatagtagcaccggcatcactcacgtatataaagatggtcttggagactctggtacacaactgtatgtcggtcagaccatcaaacaaaaacaacgtagaaattattattactataactaggaggaagatatgtctattattctcacatggttaataattattatcgctattatgtactggattttaaataagttcgttaaattcatgacagtgggacatctcaaactaaaggatttaattcgtgcaggcctttggtcaatgattggaattttcatctggaaaaagttacacccaaatgaagatataccagaccgttttaactcagaaattaataagtataaggaacttctcgcacagacacagaaaaatcacgataagaattaatattgctagggaatactaaaaagctatgtccaataagctgatcgacattaaaagctgttaaaagaggaggaacttcagcatgaagacaaagaatttagcgcttaccaacggaatcgtgggattagttggcggaatcatcttattatttgggggctggtttgtcgctggtggcgccctaagcgatgcggcaactggatcagcaacaagcacatcaggtacagtggctttattaaacattttgaaaattgccattttagcactaggcatcattgcattaatttattataaaggcgattcaagagtaaatactgcaccaggtgttttactaattgtcggcggcgcaatcgcacttattccattcttaggttggattggcggaattatcgcaattattggtggttctttatatttagcttccctaaagaactttaatcaaccacaacaataacacaatgcactattttgaaggatatacctcaggtgtcaaaggcgtattaggtgcgaactttaacgttactttcaccaatggaacattgagtggtaaaactcaatctggtatgaaatagcaatttataactggcccttgattgggctttcacgcgagcgtagttcaacggtagaatggttcctttaattcaaatatagcctaccttccaatgcaggttcgactcctgccgctcgcatagagattcttaactcaatcaaacacaggagaatcaccaatgttcaattctttaacttattttttaaaaagcatgtcctctattaagtggagcactgagctattatttgtggcaattatatcagcattagttgcatattttctctataaaaagcttcatcactaaattattacaaacgtgggtgtagttcaacggcagaacggcaacttcttatgggatacccttcccttatttcttattgccatgcgggttcaactcctgccactcacattgaccagtcaggatgtcattaaaagctaagggttagaatttaatcatcatagggaatttatttggataaatgttaatttggaggagtttcaattgaaaaaaagattaaccatcggtgccgttctattggcatcactagcactagcttcttgtggaaatagcactaacaaatcaagcgaattaagttcaaactcaagcagcctagtcgctgctaaaagaaaaaaagcaacctctttatctgaaagcaaagttaaagctagttctgaaagctcatccactgctaaaacggcgactaacaatagcactcaagttctaactaagttagtttcatatacagacaaagagtctgccggaccaacgcaaaactattattgggacaatggcaaggccaagcttactaactttgatagtatgaaagctggtaaatatgctttttcagctgataatcaaggccgctcatcagtagccaaagctatgcttacctatgctgagtaccaagcttctaaaggtagtcgacaaggaacgcccttagatccaccttcatggccaagcaccaaccctaaagtggctattcattatggattaacagatcgtgtttaccacggttttctttacaatagaagccattcaattgcagatagtcttttgggctcgggatcatatacatcggaatataattttacaaccggcacaaggcctcaaaatgttggtgcaaatcaagaaggtggtatgcgctatgctgaagagttggttgaaaactactggaatacgcattctaactctaagaatactgtttcctacgaaacaactccactctataaaggaaatgaacgaattcctcgtggttcgctggtagacattaaatcttcagataaccagctaaacaaagaagtggttgtaattaactcggttgaaggcattaaaattaattacaataatggtagcaatgatgccaaagcttatcaatcttctagtcgctctgaatcaagcaaaaaatacgtttctgaagcacctaaaaaacattcagaaactagtacgactaatagctccagttctgtctcaacaaaacagaattccgcatacactactaatggctcatggacagtggccgcttccggcatggtatttgtatccaattcaaacaaatattatagccaagtgactaatccaggtaattatcaatatattagtcaaagttctgctcaagcagatggtgcacagcaagctagtcgtggaaaccaatacgcaagaccataacaattccaagcccctcaccgggcttcacgcgagcgtagttcaacggtagaacggtgctcctttgaattgctaactagatactaacagatgtaggttcgactcctgccgctcgctttaacataaaaaaatacattctccctcaccacgaaagagaatgtacctcaaggggcatgtacgaaacatgcttaaaaacattatagatcttaaaatcgtatttgcaagtttttttgcgagtgtagttcaacggtagaacggttcctttaattcaatatagtctaccttccaatgcaggttcgattcctgccactcgcattgtaacaaataacccatactaccgcttactttagtacgtacatcacgtgggcgtaattcaatggtagagtaacgatttcagcccttctctctcgtttgaaattgttatgtaggttcaatccctgccacccacttttaaaagaaagaaggtaagattatggataaagatatgtcgaaatacgaactcatagataacattactaatgacttaacctcttttattaatctgtatgctttcgtttatcttacaaaagatagctactcaaggaaagaatatgaccgcataatccaaggaatggaaagagatatggttgatcgtcttaagcaaaaataattgtaggtacattctaattaactgttgagccgaccaaaacccattgttggctcttatgcgagtgtagtttagtggtaaaacgacagccttccaagctgtagtcgcgggtccgattcccgtcactcgcttaataccccaattggggtatatattttgagttaaaaagaacgtatgtttgggaatgtcaacctattgttatttccagttgggaggaataaaacatgtcagtaaccaaacttaataatggtaaatggcaagcccgtgtctcttataaagatgatgacggtagctataagtcggttactcatttagaaaagcgcaaaactgacgctgttgagtgggaaactaaaactaaaaatgctctgctggaaggtgctgacttatcacgtagcactgagagtctaaagcactactttcttgattggatcagaatttacaaaactgacggcgtatcgcgtcatactcacgagctgtatatgggcaactggcgtcacgtctctgcatattttaaggataaacctatgagcgcaattaaacgtccagattaccagaagttcctgaatgaatttggccgcagtcatggaattgccacatcgcacaagcttcatcaacaagtacacactgcaatcaaggacgccgtagctgatggtattctaaaacgagactttgcttacaaggcacacgtcacgggacgccctcctaagcccgtagaggaaaagtatttgacgttgtccaattataagaagctgcgtaaatacctcattaaaacggctgattatgaccacatgactatgctaatgatgctgtttcaactagaaactggaactaggttcgaggaagctgctggcctaacgtgggataatttagatttgaataacggaatagttcacattaaacagcagtgggacgcccgtagacagacttttcgcccaactaagggaaatggacaggccgatggagatataaccataggacccgcctactgtcgttttatgaggagctatcgtaacacgcagaaggattatttagaattgcacgaaatgaagaatcctaagaacctcgtattttggtctaaactaggaaaaatcgtgggcaatgggaatgcaaacgaagagctaggacgtatttgtaaccgtctaaatatcaataaagttacaacacacgccatgaggcacacacacgcttcgattcttatcctaaatcatgagtcccttccctatgttcaacatcgccttcgacatcaaaaactagaaacgaccgttaacacctacgtccatcttattgaagaagaaaacggcgtatcagataagaaggccactgagctaatggatgaaggattttagaaaatgataattttgtgattgctgtattccttgtgccacaagggattacaaaatcatttgttaatttttcttccaaaaactgctatattttgactactttttttgtttttggaagaatcgtggaagaacatatcgtgtttgagtggttttcgagtgtaaaacaaaagcaccaaaacgcctttatatcagcgttttggtgctttgtcgtttctctatatttgtcaacttatcacccgcacggggatcgaacccgtaactccgccttgagagggcgacgtcttaaccaatttgaccagcgggcacaaattcatttattatcttaccgaatgataagcggcttgtcaaatataattaagatttttgccacctaaaaatcgtcacaacaactaaaccaacgaataagagcaaacagtaggccacactacaccaaaaaacgaaagtcaataattggggtaacaaaaagctgcgcataactgctaatccgatggccgtgaccgcccatacgatcaattgttgtcgcagatgatcgaataaatgatctaattctgacttcgacatacactcaccttccatttaactagtttagccaccaactgatacgatattcaagcaaaaatgcaaaaaatagacacaaagtttcagcaaagtcttgacagtatttgctggaaaagttactattaaatagttgttattgggtattcgccaaattggtaaggcagcggactctgaatccgtaatttactggttcgagcccagtatacccaatcagaagtacggataaagccacgcaggtaagatcaaatttacctgcgtggctttttatgaattgtcacacccttgccagtgcaattttatcttttttcactcaaaacggtttacggacttgattaggggtttataatagatagtgtagactgtctgtgaagccttgtaaaattgtcactattttaaattcaatccaaaggagataatgttgttggtatacaaagatgtttttggtatcgatcacaatgattgtcacattgttcagacgcggcacgagtttaaccggatcttcattatcgaaaatgaagttggctctcgctttacttgcatcaaagatgatgccccactcgaaaagaagatgtctgggcactggaagtatgcaaaagctagcgacgcccctaagaactatgccgttccttataaggcccagaaaaactaaacaaccgttgaaaagaggattacgatgcggcgctatcaaccgttaaccaaatcaaatggccgggtcccccactcgctcaatcataacaccaacccctactatggtcagcatggtgctgattgggtcaaagacacgaatgcttcgctatttaatgcccaacatgagcatcttcaatcaaagagccatgttgagcgacgcgtgcggcacaacgtccgtcaagtgctgtgggtggtcgtggcgattcttgccatgttacttggtggttttatcttgttctcattagcgatcaatatttaacactaaaaagagtcattcagcttatacaagttgaatgactcttttttactagcctttaatttccttggtatccactaaaactttgctgaccatccgaagctcatcagttaattcagaggttcgaatccggccaaattcgtcgaggaacttgccaaggcgttcttcgttaactttttcaatgacccgtgctaacttctcacctttggcggtcaacgttagataacggtaccgacgatcataaggatcgatgttcaacacaatcaagtcattgttgatcaagtaggtcagtttccttgaaatcgctgaagaagagacgtggcggtcagcggctagctctttcaccgtaatccggtgatcagtgctatggtcaagatagtagagaatcaagaactgttcgaacgacacgtccgcatcagtcaccatcgtttgaataatctcgcgaagatggctttcaagccatgacatgcccactaagactttttcgaacaattccgcatcgtcgtacttggccttcttagtattagtcttcatcattatttaaaaccccattcatgcgtcacgttcaaggcatcatcaacaaccccgtgattacgcacggacttctgcagctggcataacggtgatttcaagatcacgtgtcatttgtttctcaatcgcagtctgaacatcacgatccgttacaactaagctcgacaacttactctttccgttgataatatcttggacgtgttgattatccaaatcatcagcagagacgattggtaagagatggaaattatcattcgttgcttgtaagcattggtcgaacaatggggcgttaactcccataaccaacacactgttttgttgttgtaagactgatgccaaccaccagttcaataattgtgcttcagaatggaagacattcgtgatggcttcttccttattcactaattgaattgataattcgtggttactaccatattgcttgaccattgctaaagagtggtctggacgatagaagttttctagtgtcacttgtgagttattcgtccggtcaaggtactgagtgactgacaagaacccggcagcatcgtacacatcccgacgagttgctaatgacccattgaagtaagtcatgtaccaaatggcaccattcttacggtacttcaacgtcataattgggttaccgccatcatcggcaattgacacaatctgcttatcagcattgcgcttatattgccatgcaggattatcaggtaattctggtttagtcttcgcaacggcacccggtacctttgcctgaatcgtgtagtacatgttgtacaagccagttcgtttatcaactaagccagctgattggtaactgttccaaatttctggcaagctgtcattatagttaaccgtaataacattagctttatccttaacttcactcttcaataagcccatgatcatttccatcgaagccttttcatcaccagacaatgattgaatcagatcggtgctgaacaagaagtactttgcagactggtcaaattcgacgggcgatactaagtgagtcgtcccgtaatccgattttaacttggcatcaatgctttcaatcttttgttggagccccttaacaatcgtggcattttgatcataatcatgttgtaatcgattgattttctgattaatcaagttgagtgaacgttcttgttcgtcttgagcactcttcttcttacgatcataagcaactaacgcatcttgagcggtatgtaagtctttttccgcactcgtaatcgcgtgttccttccgcgaacgttcacgggtttcagtctgttcacgcttctggagtttcacgagttcactgttgattgcgtcactcttttgatacagatcctgtgcttgcttctcctgttgcttcatcaacacgaataacttcttaagatcctgttcgccctgaattgctttacgcatatcagcttcattttgcttcaaatcagctaatgattgttcagactgcgtaatcttcttttccaacgatttgatggtttgatcgctcttagcaagagctttcttagcatcatcataacgtttttgagcagcattgatggtcttgaccattccctgccgttcgctatcgttcgtgttaacgactttgtcctgtttagacagagtaaccttagcgtcctttaactgttgttctaagtttaactgttcggcaactaaagtttcatactgttgcttttcgtgcttacgatcctgaactaattggaccttaagctccccacgtaaagtttggtattgcttgtttaagtcagccatttcgcgttcaatggccacactgtttttggctgctgtttgggtagcacgccgttggttgacccggttttggcccttaactggggcactagttgaagcagtcacgctgctactagttggccggacaccagcagatgaccgcacattgggggtcgtactactttgagtcgcctttggttttggcttttgagcagcaacggttgaagtcgccgttgcacgctcagaatgattacggtaatcctcattcttatctctgcgctttttattgaacatcttcataatgcaactcctccataaacttgattgtttgctcaaagagtagaaaggtcatcgctgacctttctatccgttcagcaaataatcaagctattctaattattatgcttcatgcttccgacgagaaacgccaaagtatagcgctgaacccatcaataaggttgaaagacccaagacagccaaggcagtcccgttttcgtcttcatccgtttgtggtaacgtctttgcgtctgaagtcgtcgtcttagtcgtaactactggcttcaatgaggctgatgcaggaacaaccccactagtcccattgttagtagtagccgtcgtcgttggcgttacttcatcatcagaaaccgtggttgctggtgccgttgaagtcgtcgttgatgaaccgttgtttgatgaaccattaccattatcaacagtatcgtcacttggcgtcgtaacaggagcagttgtagttgtaccagtaccgccaccgttgacgttgtcaccagtgccaggtgcagtcgtaggtgcggttgtcgtcgtgccaccaccgttattaccattgtcaccggtaccaggtgcggtggtaggtgcagtcgttgagccgccgttatcattcttagcataagttaaggtgatcgtcgcgtcatcagccaccgtaccactcaaagcaccatcagctgacttgtaagtgtaaccatcgattgaaggtgttgcgaccgtgtaagtgtccccaactttgtaagttgtggtcgtcgcactcttgatcgtattaccatctgcgtcaacatagttaactgtgatcgtcttagtttgttcagttggagtagtgccaccgttcttcgtgtaaacaagggtaactgtgttaccgttgtaggcaatcgttccggcaatggcatcaccagtggcatggtcataagtgtaaccagcaatttctggttgaccaaccgtgtaagcttgaccaacgatatattcagttacgctggatgctttgatggtgttaccatcagcgtcaacataattgatcgtcaagttagctttattttcaactggtgtcgttgaatccttggtgtaagttaaggtaatcgtcttattaccatcaaccgtaccagtcaaagcggcatcagctgacttgtaagtgtaaccatcgatcgttggcgtttcaaccgtataagttgagccgttatccaaagtttgggtcgtagcggccttgatcgtgttaccatcagcatcaacgtagtttaccgtaaccgttgattgttcaactggggctgcatccttcgtataagtgaaggtaaccgtgttaccaccagaaacaaaagtcccagtttgggttgcatcacccgttaaggtataaccgtcaatcgaagcggcatttacactgtaagcaccgccaacttcagctgcagtaccatcagcaccttctgtataagtcttagaaggtaagatcgtattgccatcagcatcaacgtagttaacagtcaagtttgaagcttcggtattttgtgagtagactaacgtcaattcagtaccagcagccgtcacattaccatcagaatcagtagtgtcagcggcaactgttccagtcaaagcactggacttagtcgtatctaacgtgtaattactgaaagtagcaggtgtaacggtgtaagtattgtcaacatcgccttgaacagtcgtgtcatccgcaatcttattgccgttttcatcaacgtaatggacaacgaccgtaccagcggcaacagaagtatccattacttgggttgcatagctccaagcctcaatctgctgattggcatcagtgttgttagtattagttgataacttattaactgaggtagtccctgtaaattccaaatatgcagcccggctacccgtcgtcgcgtcgtcgttagctttgaaagtatagagaacagtgacataactatcagcatcagttagcttcgtgatgtccacagtggcagttgaagcaccagctgcgtaactgtattccttaccggattcagttgcgtattcaacggcagtccaagtgccattactgttggaaccatttggcgcaattgaaacttgaccagaagcattagcccaatcaagcgcttggctcttggttaaccggatggcaactgcgtacgtatgcccggcagtaactttgatgttcgtgccatcaacattttcctgaatgtattgtgcttggtcttgtaagttgcccgaaccacccgactgagtagcactcgtcaatgttccagcgtcaactgagccagcagcagtttgattagcagcttcagaagctggtgccgttactgttggggctgtagtcgcagccgtggtcgtagcagttgtggttgccgttgctgcagcagaagctggtgttgcaactgatgccttagcagccgttgctgcaacagttgccgttgaagtcgatgtcgcatcactgcttgctggtgtagtcgcactgacagttgcagctgaagaactagccgcactcgttgttgacgtagcagctgaagaagcagtcgagctggcagcactacttgaagtagtagcagttgagctagccgtacttgacgttgaagttgcagttgaagatgcagaactggcatccgtagcagctgatgaagtcgccgttgaactagttgcagcagagctggcagcactagaaacttgttccgtggttgcgtctgagctagcagcagtatcagcagaagcattaacgttggcaaatactaaacctgcagccaaagctaacgtggttgcgccggcataaacccaacgcttgccatctttatacatctttacccgataaaccgaatcaccggtcattttttgattatcttttgacatatggaatcctccccgagcacccacgattttctgcatttatgtaaaatgatgggcgacaaatcgcttgccagcccatcatcttagtcgtgcttatcgtgtcgtgcttaataacaccataacgattttgttggcatttcagttatatttaacgaattagcccttgaatgcggcaattacgtttaagataaaactgtgtaatccaccaaagatgtcgttggaaacacttgatgtatatgatgatgtgtgtgtacctggtaaaatatgaaaatcattgaaaaaactcatgagattaatcccctttaattgttaattaattagcctttgaatgcagcaattacgttcaatacgaattggtagaaagtaccaagtggttggttgctaacgtagctggtgtgtgatgaagtatgcgtacctggtaaaaagtgtaaatctgaaaagaaactcataatgtatatcctccctcattatctaaataatatcaagacattaattaatatattaattaattagtttatcgaaatagattatcccttgatcgctttaataacgttcaagatgaagctgtgcaagccaccaaagatatcatttgaaacacttgatgtgtatgatgacgtatgcgtacctggtaatacgtgaaaatcgttaaagaaactcataatataaatcctcctaaaagattagttttgattacttgctgaataagctcttgattgcaggaatcaagtttaagataaagctatggaaaccaccgaaaatgtcgtttgaaacacttgatgtgtatgatgacgtatgtgtacctggtaatacatggaaatcgttaaagaaactcataatgtaaatcctcctatgattgtttgactaaattactttttgaatgcagcaatcaagttcaagacgaagctatggaaaccaccgaagatgtcgtttgaaacacttgatgtgtatgatgacgtatgcgtacctggtaatacgtggaaatcgttaaagaaactcataatgtaaatcctcctataattgtttgactaaattactttttgaatgcagcgatcaagttcaagacgaagctgtggaagccaccaaagatatcgtttgaaacacttgatgtgtatgatgacgtatgtgtacctggtaatacgtggaaatcgttaaagaaactcataatgtaaatcctcctatgattgtttgactaaattactttttgaatgcagcaatcaagttcaagacgaagctgtggaaaccaccgaagatatcgtttgaaacacttgatgtgtatgatgacgtatgcgtacctggtaatacgtggaaatcgttaaagaaactcatgttgaaatcctcctataaaattaactatgattatttgctgaacaaactcttgattgcaggaatcaagtttaagatgaagctgtggaagccaccgaagatgtcatttgaaacacttgatgtgtatgatgacgtgtgggttcccggtaagaagtgcaaatcagtaaagaaactcatgaataactcctccttttaagttagttaatggttaaatccccaagcctagccacttgtatggcaagacttgagagtttggaaaacaaattaaattccgacaaacttgattaaacagttagaaaattcaactaattaatcattgaattccctaacacccgtctctagcaacgcttaacctttgattgcggcaatcacgttcaacacaaactgatagaaagtaccaagtggttggttgctgacataactagtatgtgatgatgtgtgggtccctggtaagagatgtaaatcactgaagaaactcatgttaatatcctccttagaaaatttacaaattgttcacaaattagcagctcaataatcattaatttaatttagtctgttaaataactaatattgattactaatgcgaacgtgaaacaagtaacctcgtttacgatttaaatattaactaattcgccccacaatcgtcaataaaattactaatatttgaataaatacagggcagtatcatattcaatcagtaaatgtgtatactatggacaacttacgcgtttcattaacggtcaaaatttgtgtccaatatcaatattatttatatttatcaccagttaactatgccagcagaaagcgtttaaacccctgataatatcagcatttcagcgtagttgcttgctgcgacatcccctctttttttccgaattatgaaccataccatcgggaaatttattccctaaaaaataattataaatatcgcttttttcgacttattattaaaattattaatactttttatattttttacggcggttttatttcatgccttaacccacgttatccagttgaatacatattttgggatcaaaaaagtggctattgccaacactcagcaataaccacttactaattttaataatcaaacaatatttcactaaggcctttttaaccgtgttgatactgcagccgataaaagtcacgataacgttcatgggttgctaataaggactcatgattgccatcacccgtaatctgaccatcctccatgaagagaattcgcggataagcttcgatctggtttaaccgatggacaatcgtaatagtcgtcaggtcagctggtaacgtcgccaagagctgggtcacccgttcttggttctgattatcaagactagccgtcgcttcgtctaaaatcaataacgacgggtggccgacgagtgcccggacgatggccaaacgttgccgctgtccaccagaaacattcaagccccgttcaccgacgtccgtatcaagaccagctgacagttcagctagccagtccgctaagccgacttgtgtcaacaacgcactcaattgttcatcagagaccggttccgtcgaacctaacaggagattatcgcgaatcgtcccgggcatcaagtctacttcttgactcacgtagccgatctgattacgaatcgagggaatcgtataactggccattgtctcgccattcacgtccagctcaccacgagttggcgtatagtaagcctctaagagcgaaactaaggtcgttttcccgctaccactctcaccaatcaaggcaatccgctcaccgcgatgaattgtcaaatcaatgtccttaagcaccggtttatcactttcgtagccaaaatcgacgtgatcaaagtcgaccgtatcgattgttgacagcgtttcgcctgacaaccgcttatcttcttccggactatctaaaatgttgtcgattcgctcagttgccccgaccgtttgttgcaaggcagtcactaagcccgttacgctactcagtggtgaaatcatttgaacggcatacattaagaaagctactaaacttccaattgtcaacgcgttcgtttgtaccaagatcccaccataaacaatgataatgaaaattgcggccagtaacatgatgtttagcactggattaagcaccgagatcagcttgatttgacggacactgaagcctttgatccgatcaacttgatcttttccctgttttttcagtgccttttcagcaaccattgctttcactaaccgattttgaccaatcatttgtactgctgcactatttaagttggccgtttctttttgaatcgctttggagatccgcgctaacacttgacccattggcacaatgatcacggccatcaatggaaccacaattaaaataataatcgttaagcggaagtttaataacaacattaacgtcaaggaacccacaattgagatgatcccattaatggcattcgaaaactgacttgaaatcaattcaaaaatcgtcgatgtatcgttaactacccgactagacagttcccccgtccggttatggtcaaaatacggaatcggcaagtccacgatatgttgccataacgcgctccgcaacgtcgaaacggcgtcgacccccgtataactaagtagaaaactcgacgcaacacttgcaaatagctgcacgacaatcacagcgcctaaccgaagcaacagttgacccgaagtaccatggttaaaggcgtcgataaactccttcaacatcaacgtaatgccaagactacaaatcgttgcgacaaacgacaacaggattccaatcacaaagagtcccttcttcgggtgagcatgggtcatgatcaatctcaataaatcacgggtcccatacttggcatgtggttgtttagccgatgacgtgatatgcgtttccattggttgtaactcccctcattgcttgaatatcaggctgaatgacatgatcattccaccgttgccaaatcatagcctcagaaaaacggctactgttgccatatgcccgttcactcatcttcgccaactgtttagggtgttgtaagagcgttaaaatcaccttgcccaattcaactaaattattgggggtgatcaatcgcccattttcaccatccgtaatcatcgttgccggaccatacttaatgtcataggcaaccaccggaacgccatgacttaacccttctaaaatacctaagttaaagccctcatattggctagtaaggaccatcagttgtgcttggttatagaccggtgtcaaatcgcgctcaaagcccttaaacgtgataaatgactgccaacgttgcgaactgaccaaggctcgcaaccgattttcttctttaaatccagtccatgaatcaccataaccataaatatctaaggtcacattcgactgtttttcatgaacataggcgaccgccttaatcaattgttccaaatttttctctgccgataagcgagcaacggcaatcaccttgccctcaatccgatccttaaagtcaaccggacgagctgctaattgttcgtcacttacactaccaactggaatcgctaaagttggaatcacattatgaatgtggttcgtcatatcatcacactcttcttgcgtggacatgatcaaaccagccatttgactggcgtgatctaacccgatttgagtgtacggcacaattggtgagttcacaacgtcaagtgggtccagcgtgaaattactgtgtaagaactcatacttgcgcgctgctgtggacattttaacaatcggattcattccagcatcactacgatccacgatcatggttccgtgaccgccatactcagtatttaacgcgtctaagaaaaaggcagtcagctgatcccagtcctcaaattcgtaattatgcccgtgatagtttaacagccgttgatgagtggcaactggttgttgcttctcatttggccggaaaaacgtctctaagacaggctgttgttgtaaattacagtgttgctctaacacaatattctgcttgtcatcaaagtactgggccaccgttaagaagccccgcgtatcataatagtctcgacggctgaccgcgccctgtggattgagaatatcgacgtaatcaatattcccctgcgcatttaacatcagtgctttttgccgttgttcccgttgaatgacgtcaaattcattagcgctgacccgttccagcgtttcacccgtcacccgtggataattggccgcagttaacggttcgccttcgtaattcgtagtgccttgaaaataatcatacatattgacctggaactcatcatcatacccaatgagttgcatattatgatgtaaatcgcgtacaaagttacgggtcacgatcaacgcaggtacccggtgctttgtgaataatttttgacgctgaatcatggctaactcaatagctgatggcgtcgaatcaattttgctcgtaataaagaaatacatttgctacgcccccgcttttattcatgtgataaactctcgactggatccaaccgtgccgccatatgtgccggtgccaaagcagccaataaactgatgacaacactgactgtaatgccgcccagcattgctgccccggagattcgaacgattggatacttaattaagctatagatggccatattgcctaagaattgccaaccttctccaaacagtaaccccataacggcggctaataccccgatagttaaggcctcagcaaagaacaaatgactaatatcgcgtttgcgggcgccaagtgcgcgcaaaaccccaatttcacgagtccgttcagaaacgctgacgtacaggacaacaatgatcataattgctgagactaataacgcaataccagccaccccggtcaatacgttagtggctaaacgaatataggtattcaatgaatcaattaaatcaccgattccggtatagttatactgttgcttcttattcgttcccttgattgccttgatttggtgttcgacttgcttaacattcgccaatttatctatttgaacaatggcaaaatttggtcgataagccacattcttagcagttaacatctttttgacggtttgtggtaagaccacgacgctagtatcatcgctacccgtaattccgctgacggtcagcgtctgactgaccgttacggactgattcttgcgattaaccgttgccaatttaacggtcaacttcttattgagcgcttgttgataatttttcttacccaccatcttcttagctaacttacgaccaatcaaaacttgaccattttcaggacgtgaaccgtccttaattgtcttactcaaaattgtggggttatccgtctggagactggccgtcacggttgtttttttataactcgcttgtgtgctcgtgtaatagcccagcttagcagacttaacatgtttgatagccgctaattgtttgacgtttgcagtcgtcacttcggcattcttcgcggctgtgacttgttcttggttaaccgctgctttgtaagctgctgcactggttgcttttttacgcgcagccgtgctgactttccccgtcttctttgatacttggacagcggttggattaacttgagacgtaatctggtgattcatataattttgaatccctgatcccaagcccagcattacgacgatactactgatcccgatcgacgatccaaagataatcagcaggtaacgaagccacattcgacgcatatgttgcatggacatccggaacatctgccgaaagccaagtgttcggtaacgcgtcggttgcttatcgaccacgtcgaaaggcgccccgatcactaattcgtcatgaatctggccgtcatccaaatgaacgatccgcgtcccgtagtcagccacttcctgcgaatgggtcacggtgatcacaagtttaccttccgcagcgattgagtataaaatatccattacttcttgggtattttcactatccaacgccccggtcggctcatctgcgataataatatcggggtcactggctagtgcgcgagcgatggcgacccgttgcttttgaccaccggatagttcatttggatactggtgcgtctgctgctcaagtcccacccgcttgagtaggtcctgtgcttgctggacttgttgcgcatgggacgtcttagtcatctttaatgaaagcatgacgttatccaagacagttaggtaacttaccaagttaaagttctgaaagataaacccgattgtctcccgacgataccggtccatttgccgcacattcattgaacgcaaggattggccgtctaacaagacatctccatcataatgatgatccaagccaccaataatattcattaacgttgacttaccaccaccagactccccaagaatggaaataaactccccccgttcgaagtttagattaatgcccttcaagatgacattctcttggtgatttaaggtataggccttacgaatatcgtgtaattctaaaaagctcatatatgtacctccactattttattaactacattccccacaatgtatttcctcattaataacattgcgatttttggtgaatgatgtaaagtgttattgaatacctgtggtcatcattcataattaaaattataatcatcctaaatcctaataaaccgcctacttggtagttacaatttgtaaaatatcacccattttgctgatttttacaataaaattttttctatttcgaacttattttatgacggcaatcacgacttaaccgtcagcagagataaatccaagcaccccacacattcaaggcatgaactaaaaagcgtccattactaggcacactgactgccagtaacggacgcttcatcgtattaaattacacctaatgactccaacttcaatcagcaggattcctacttaaaaaaggaccgcttcgtgaccacgcggtaaatcgcatccgctaaaccagtcacaaatacgacaatcagccctgcaaattgcaaccatggcaattgttgcctgattactgtcacttcactccccagccaaaagactagtaacccgagaacaataatgatactttcgataatgtttaatttacgcatctcaaactcctcacgtacatcacacatcgttgcgagcaactaccatgcatgactatatttgtcctttaacacctaatctattataacccgtctgctgttaaatcacatgccaaccactcacgattaaactcgagataggtcggcagatttttcattgcgtgatgtcattcaaagttagtgcaaccagtgcggtcaaaaattacgagcgtcaccatgttaaattagggtcatcttgcggacgtagcgattcatttcgccaacaacgttgtgattcataaattttagattagcgacgacgctcaataacagctacgaacacagcgtcagaaagacaagcaaaaagcccccaaaacaagcagcctatcagccagctgatagttgtttgttttaggagcttccatcttaatttctaaagtgctagcaccttagtcactaagacgtgcggttaacttcttagttaattcttcgtaaccaggcttgccaagtaaggcgaacatgttgttcttgtaagcttcaacaccaggttggttgaatgggttgatcccgttcaagtaaccagaaatggcaactgcagcttcaaagaagtacatcgtgtaacctaacgtataggcatcctgtgaaggaatgttaacgaccatgttaggaacaccgccatcaacgtgggccataataaccccttcgaaagctttggtgttaacttgagccatcgtcttgccttcaagatacttcaacccatcaaggttttcggtttccttaggaatgtcaacatcactagtagcgttgtcaactttaacgaccgtttccatcaagttacgacggccttcttggatatattgacccaatgagtgtaagtcagtcgtaaagttagctgatgatgggtagatccccttttggtctttcccttcagattcacccattaattgcttccaccattctgagaacatcgccatgtttggttcgtagttttcaagaatttcagtggtgtagcccttccggtacaagatgttccggtaagcagcgtattggtaagcttcgttcttagataaatcggcatctttgtattcattttgggcatccgcagcacccttcattaatgaatcgatgtcgccgcctgataccgcaattggtaacaaaccaactggtgtcaaaacagtgaaacgaccaccaacatcatcaggaataacaaaggtttcgtagccttcagcgtcagcttcttgcttcaacgcaccgcgcttgcggtcagttgtggcatagatccggcccttagcagcttcttcaccatacttcgcgattaaacgttccttgaagacccggaatgcaattgaaggttccgtcgtagtccctgacttcgaaatgatgttaacagagaagtcacggtcgccgattaagtgaattaaatcgttgacgtatgaagatgagattgagttcccagcaaagacaacttgtgggaatttacggtcttcacgtgaaagtgatgaccagaaagtttcgtgtaagaattcaatggctgcccgtgcaccgaggtatgaaccaccaatcccgattacaacgaggacgtctgaatcgtcttgaatcttctttgcagcggttttaatccgtgcaaattcttccttatcgtaatctgttggtaaatttaaccagccacggaaatcattaccggcgccggttccttcacgcagctccttatcagcagctgtgaccatagcttgcatttcgccaagttcgttattatggacgaacttagttaaattagagctgtcaaatgaaatgtgtgccatttactattacctctttctatacgtatttacatgtcatattatacaatagctcgcctaataatgaaaagcgcttcctcccttttttcgtaaattttcgtcatttgtgtaaaaaataaatacaattattaacaaaaaaggtgctgataacttaccgttaccgcaccttcaacagatttttttaatctgtaaatcaaataattaattttttagtaaagctttactaagccttcattaaggataacgcgaccccaccaacaatgaccaggatcgagccaatcaccacgtaaaccatttctcgcttcgtcttgtgctctcctaagaggtagatactcccaaacgtcgaaataacaattcccatttgcgaaagggagtatgcgacagcttgtccgatttgggccattgccataaacatgaagagattcccaataccccagaccagaccagtgacgatattacgataagttgctttaacaacccatggcttatccttaaaggaccagatcaaagcacccagcaacatcccaacagcttgaggcattacaactgcctgtgcattgacgttaccataatggaccacaatcgtatagccagcgtatccaatcgttgataagatcaaggcacgaatcccaacaccccaattttcagaagcactacggttcggatcagtcttatcagttaaggaagttaaaacagccccggcaatcaacacaattacagaagcggagccaatccaatacatgtttccgtgccattcattgaataacagcacaccggccaacgcattagcaaccagttgcatcccagttgaaatcggcgtagtccgtgaaataccaaccgccttcattgacgtaaattgttgaccttgaccaatactccagaataacccagagacaatcccaatcaaccaaattttgcttgttaaagttggctgttctacggcccagagtgccaagccaaataccaaggctcccatggtcatcccaagggtctgttgccgagcggtaccgcccattcggccactaattaagccgatactgccccacgcaatcgcaggaatcagtgcaattagaattcccattactaataatcctcatttctatgttttctctcttgcctaacgacaaggaattattttaccagttaagtaaccgttttaccagtcacaatcagggattcagggttaaatataattatttttatattttcatgaattcgttttcttagcgatagggaccgttttcaattaatgaaaacggtccccgaaataccctttaaaatttttttctattccacttaaattatggcgcacacactacttatcgagtgtcaaaaccagaaccttcaaatagttgcttgccaagtaagccttgcgcgtcacgaagtctgctggtaaccggaacgtctcactaagtgtgaagtgccgatcactgccgacaaaggccgccgtgaccgcggctttaaacttcttcattgaaaaattattcgcagtcgttgcaatcactaattgcccatcacgccgaacaactggtaaggtcgctgtcaataagtcagttaaatcagttgcaacttggaacttctgctttttcacccgcgcaaaagtcggtgccgttacgacaacaacgtcataacttagtcggtgcttctgggcgtaatctagatagctgttcacttcgattgctcgaatttcctgcttatcagggtcaatattattgaccgccaattgatcagcggtctctttggcacccttcttacttgtttcaatggaaatcgtcttggcagcacccgcaacggcagcagcagccgtaaccccattttcctggctaaacaagttcaagaccgtcttaccttgcaattcggctccggccaaccattcccggatgggacgcatatctaatagtaacccggtcgttaaatcatcagcaaggtgtaatggatacgtcaccgcgccttcagtcactaataacggctctggtgctgcttcacccgtgacgagttgactctttaagttagcttcttcgacattaaatcgtaatttcgcatagatgcctttaaattgatgttcagtagccgcttcaaaagccgcatagatcatttcgcgttgctggtaaacaccttgtgcgtaccatgtaaagacatagtaatcttgataacgatcgattgttaacccgccgagaccgtcgccatccgcattgaagacccgttgtggtaactgtggatccatgctcgttgctcgccggaccaacgcctgtttgaataacttacgaaagtaatcggtcgttggcgtctcactttcatccaagctcaagacccagcctagttgccgacgatgcttcgcaatcagcgcgtagcccataaattgagaacttgccattaacgccacaaaagagccatcggttagtttcatactcggatccttgagatcatcttgtacgagtaaaggatagccgtccttgactttacgttgcgaatttcccgtaatctgtactctttgcatagttgttgtttctcctattcatttcaaatcttatctaaactattgataaatcgctgtttgcagccttgttaagggtaacatatttagcctcagagtgcgaggtagaacagtgtcaatcgctgaaaagtattaggcttaaggtccgcaatcgattactattaaacgtccgttcctactattaatgatgggttattgctatggcccaccgttaccccgcattagcaaaaccgggcctcgagatcattacgatccccaagcccggtccgtacggatttacccgctttaaactatcacgttaatcatcaataatcggtttatcaaaaccttcatctgggaaagtaacggtaaagcacgtcccttcgttctccacactgtcaaccttgatcgaaccaccatgttgttggactaattgatgtgaaatcgctagccctaaacctgattcaccatacttcgtattctttcgtgatgggtcagccttataataccgttcccaaatatttttgacttggtccggtgtcatcccaatcccatggtcttgaatcgcgacaaccgtcgcatgatccgtacggctacccgttacttcgatcacgttagcttgtgaaaactgaatggcattctgcatgatgttaaacaagacctgaacaaagcgatcataatcggcccatactggcagtttctcgggaaccgtcagcttgaattcatcatccgcggcggccgctttctttgtgagctgttcaactaagttatgcaaaacctcggcgccatcaaaattggtcttgttcaaagcaatctgtccggttcgaattttttcgtaatccaagttctcattgactagtcgaatcaaccgtttcgtctcattttgcatcagttcaattgaatgacccttgtcttcttctggaatagcatcgtacgctaacccttccaaaataccattgatcgtagtcaacggcgttcgcatctcgtgggccgcatcggccataaactcccgacgccgcttttcctgtcgcttaatttcttcattggaagttcgcagggagttgaccatgccgttgaaatcatccgccaagtcatcaatctcatccttatgattactgtcaacttgaatgtcaaaatcaccatttgcgaccgaatgcgtcgcgtaccgcaatcgattaatacgacgaacggaataacgtgccaaaatgtaacttaacaacagagccgcaatccctgagactaacagtgcaatgaacagatttttttcgatctgctgttcattggcctgcaaggtctgttcaaacgacccaatcgagatggccccaacaaacttcttcgttgctccattcttatagaaaagtggcactaaaacgtcaatggttcgcaacgacggtgtattcacgggttgatcacgattgcgtgttctgaacgtgacgtggggcgactgcgtaataatcttattccgcttcagcttcttccaatctttggctgagatcttgggatcataaatcgagccaccgggggtcccgctcattgttgtccccataccacttggatagaccaactttttgttagcatcatataccgaaaagtgaatatgttgatctcgtaagatgacggtcccatcatttagaaattgttgattaaacccgacaacttgattagtcttcgtattataccgaatagcttccttttcaatactcgcggcgtactgctgcaattgttgccatgagttttgataaagcatcgttctagtcgttcgaataaatgaaaatccgaggacgacgattaccgtaataatgacggcaaagaacgctagcatttgttgataaatcagtttcattgagcgtcaactccactatcatcaaacttgtagccgaccccccaaaccgtctgaataatttgtggcccagctttttcaatcttttggcgcaattttttgatatgtgcatccacagtacgttcgtcaccataatattcatagtcccagaccagttgcaaaagttgttcgcgtgagaaaacttgccgcggcttttgagctaaggtcttcaataaatcaaattctttgggggtcaagtcttgaatttgtttgtctgctaaataggcttcccgcgtcttggtattcagtttaaaatggtccgtctgaacatcaaaggaactcaccgtgctggcaggttggtcagccagcgtggtcttagccaaatctgctcggcgatgaagggccttgatccgagcaatcagtgtaatcggtgaaaacggcttggtgacataatcatcagcgcccatctctaagccgagtacctggtcactttccgaatcacgggccgtcaacataataattggtacagttggggaagccttgcgaatatccgcactaacttgcatgccatccttgcctggcaagttcaagtcgagcgtcaccatatcccagccatcgacatcttcattgaacatttcgacagcttcattgccatcataagcaaaatgggcatcccacttttccttcttaaaaaacatggccatcatttcagagaccgatttattatcttcaatcattaataatttcatagtgcaacgtcctccaagttaattacgattgctaactttgttgattaatcatcatttattaacctatctattatcataccctacttcgcgctaggattcaggattagtataacaacaaattaataacaaagcgtgcacgatttgtgaaataactgtgtcatcccatcattgagggacacttaataatcttggcacatcagtcacacatcataccagagtcatgctcactgacataaaaagcacgattttctgccgttcataccgaccaggaaatcgtgcatcattcagttacatttcacgagttgcgagcgtgaagtcaccatttaagttcaggatgactgccggttcgccccttcacaacgtccactgtgcctaattcttaaaggagtggattggtgccggaatatgacccccacgcttaatgaacgtcgttggttgattggtgttgaccggcataactggtgcttgaccgaacaagcccccaaattcaaccgcatcaccaacacctttgccggtagctggtatgacgcgcaccgccgttgttttgttgttgatcatcccaatcgcagcttcatcggcaatcatcccactgatagtcgcggcactagtatcaccaggtactgcaatcatatccagaccaactgaacacactgctgtcatcgcttcaagtttttcaatattcaaacgaccagcactgaccgcccgaatcatctcagcatcttcagaaaccggaataaaggcacccgacagtccaccgacatgttcgcaggccatcacgccacccttcttcacggcatcattcagtaaggccaacgccgccgttgttcccggcgcaccgacactttccaacccgatttcttccaggatctcagcaaccgaatcgccttcgttaggcgttggtgccagtgatagatcaacaatcccaaatgggacgtgcaaccgttctgacgcgatggacccaacaaattgccccatccgtgtcactttaaacgccgtcttcttaatttgttccgacacaatgtcgatcgactgaccgcgaacttcttctaaggctcgttttacgacaccagggccactgatcccaacgttaataactcgatcagcttcaccaacaccgtgaaaagcgcccgccatgaacggattatcgtcgaccgcattggcaaataccactaaactcatgcaattgaccggatcgtcagccgcaatctgctttataatacgacccatttcaccgaccgcgtccaagttgattccagcccgtgtcgacccgacatttaccgaactgcaaacacggctagttgcagctaacgcggcgggaatcgatgcaatcagtttgcggtccccactctgataccccttctgaaccagggcggagaaaccaccaatgagatcgacacctagcgcttgagctgcccgttccatggttactgcgtacgcgacatagtcttgatcctgactcgcagccgcaatcaatgcaatcggcgttaccgcaattcgcttattgatgataggaataccgtactcttcttgaatttgagcggccactttgaccaggtccttcgcgctagtcgtgatcttatcatagattttttgccgggcccgctcaccatcactatcaacacaatcaaagagcgaaatgcccattgtgattgtacgaatatcaagattttcctcggccaccatctgaattgtttctaaaattgaacgactttccatggccgcctcctataacttctgaattgcgtcaaaaaccgcttgccgttgaattcgaatcgttaactctgatgcctcaccgagcgattctaacgcctctttggccgccgcaaaacttaattgctggtcatcccattccgccgatagcatcatggtaaaattatgatccatcaaggtttgcgaaatatcgacaatattgatttttaaacgtgctaactcgttcgctacttttgcgacaattcccacttggtcctgtcccacaacggtaataattgctttcatctttatagcctccgttagacgcatcattattcgcgtttgattgttcatatcatagcatgagttcttctgaaacgcacccgttacttttgatgaagtaacccatgagaataataagagattcctcataaacataggttcccagacgcacctttgctataatgaaaattgcttattattttcagaaaggagtcgtaatttgacacaacaaaatcatttacggggcgtcttactcgctagtagtgcctgtattctgtggggtatctcaggggtggctgcgagtaccctcttcatcaataatccgcatctaaccgcaatgtggctaacgcaggtccgcatgatcagtgcaggcttgattttactcgtctgggggatggtggctggtaaacatccctttaaaatctggcatcaccgccatgccgcttggacagcggtgagttacggtttgctggggctgattccggttcaactttgctatttcgaagcggttcgcgttggtaatgccccgattgccacgattatccaatttcttggcccattcattatcagcatctattacttcttatttaagcacgtgacacccagtcgtatcgaactgattggtatgatcatggcctttatcgggacactattgatcgtgacacacggtcacttaaacagtctagcaatttcacccgtcatcttgttctggggcggcttatccgccatcggggtcgccacgaacaccttgattccgcgaaccattttaccaaagtatggcgcattaaccgtcactggctgggggttactgattgcgggtctgtttctaaccttgttacaacccatgtggcgtgtccacctgacgattacctggccccaattaggcttgttaatcgtcattattctcttaggaacggtggcccccttcctgatgtttgcgcgtagtttaagcgatattctaccgacaacggccagtttgatggacgccttcgagcccttagccgcgacgattttctcgattacttttctaaacgttcaactcactagcttcgattttatcggcggcttactgattatcttggcagtcatggcactttcactgaacacacataaaatgttgcactttttgcggcgccgccgagcacactcttcatcttaaactgctgtaatgattgtcatgaccagtagacagattagttggcagaacagttgagctgtgctaaactaggattgttgaatttggggatgttctggattcgacaggtatagtttgagttcggattgcgcttcgtaggttgcgtctacgtaaaaacgctcagtttaaattataactgcaaaaaataataacaattcttacgctttagctgcctaataagcgcttaacgtagatcctcccaggatcgtccatgttctggatctgggtcctaaatttagtggacttacgctcaaagcttccacctggagttgcgagaagagactaatcaggttagtcattgctgggtgccctgtcatacggcgtttgcaatgatgaaatttaaatagtatgaatatgagcgtagatatccgaggggcaatatgcttggacgcgagttcgactctcgccatctccattactgagtttcaaagtgatgtaataagctccagaacacttgttatatcaatattcattaaagctatcctaacgggatagctttttttgtcctattttgattagcgtgctacttcagtaaaaagcccttttccaaattggaaagggctttttttaccgataatacaaccatggttaacctgatcaaccgaaatctgtccaataattataaacgccacagccaacggtgttaaagtggattgcaaccagtctgttaaaataataagtgctcacggcactaatccagctgcgttagcatgcggccatttagaccgtaccgacccgctggcggttaaacccaacctgtactaagatccgatacaataacggcacaatgatgacacatgccaccgcattaatggtcgctgctaataaactcgtgaaggacccaatcatggcgaccttgagcgttgtccccaccattaaggcttcaatcacgcctgtacaccacgaagtgacgatttttgtgagccctgcgactaacgatacccagtaaagccggccaatacgatcttcacgatagccgattgacttgaaactcaggttgaccatcgcggccagaataattgcttcaataattgttaaccacgaagttgcggcatacccattcagaatatcaaacaagccaagccccactgcaccagccgtagcaccatagccaaaaccaagcagcatcactgcgagcactgtcaaaatattaccaaaatgaataaatggccgcccaacaatcgcgggcaacggaattcgtaatacactgatgccaataaaaataatggcggcaaataaccctgccaagacgagtttttttaattgttcagaccttcccattcaattccctccaatttcgcacatctatttatcattatattctaatataagtgtgaatcaattgatagtcctagtctatttttttcgtgacggtaactgaataatagtcgctcgtgtgggcgtctcaacacttacttcatacgcaactgctaacaaatcataagcagctcggggcattttgtattgatgacacactaaataataacctagatcaacagcgatttggtgcgcgatagcaatactgtcaccactacgattaagccggcgacgagcccgcgcaactaacctggtcaacacaacatcgcttcgaatctcaattgccatgctggcaagtgctagttgggcacttaatcgttcattcggttgggtcgtacgtgcttttgcctttgccatttttttcaactcctcagtgtaatcataggagtttcgctttggcttcgcaacgaatgacaccctcaaagccgcgtcatcactgagctcgtttaactttcacaaaaaatattattgaatcatttcaattcaaattcagcaacagcgcccacatcactagtccattccatataagtaattttaacttacgatttaatttatatctgccaccgatacttaatcatccgtctcttgattcggtaacccgaatagcaataccccaacaccgagtaagagtacggccacgaacaccataaaaattgccggaatgccaaatccaattgccatcagcgcaccaactaaaaatgggccgatggttgcgccaatgcgaccaattgactgggcaacgcccataccaattccccgtaccgcgggcgcaaattgccccggtgtgaaagcaatcataattccccacgcccctagcgtaaagaacgacaaccatgcaccactaatcagaatcatcgttggattattggccgtcccaaaagctgcggcactgacgaccgtcccaatcagataagttgccaataccgccttacgcttgacgacgccgatcaaccacgcagctagataatagccgggaagttgcgccaagctcatcaacatcgtatagccaaacccatgtactaatgaaaatccgcgcaacaccaaaacgcttggaagccataaaaacataccgtaataggcaaacataatcacaaaccatagaatgctgaggcaaatcgtagctcgtcgatatttagcggaccacacttgccgcaatgcctgtctaaaatcaactttttgtggccgattagcctcctgttctgcaggtaagtgtcggcgtaacagcaacgcatacaaccccattaaggcggtgattaagaccgtcatccgccaaccaatgtgtggcatcactaaaaaggccaataacgatgctgcaatccaaccaaacgcccaaaaactatctaccaggactagcatgcgtgagcgctgtgttcccgtataatgatcagcaatcattgtcgcagcaaccggtagttcaccccccagaccaatgccagtcaacaaccgaacgactaagaaccactcgacgttcggggtaatcgtcaataacaaattaccaagcgaaaagagcagtagcgtcccaatgaggaccggcttacgccccaatttatctgctaaatagccgcataccaaggccccaatcatcatgccaagcgtggtgatcgcactgactgctcccaactgtcctgcagttagctgccaactttctttaataaccggcatcacaaatgatagcagggccacgtctaacgcatcaaaaagccaggccgtcccgatgacccataatagcttagcactatttcttttactttcgaccattccaatactcccccaaatttcctaattagccttccgctgatttaggttttttttacctttatggtgctataaaagtagcataccgacttggacgtgtcaaatgaactactttagccggtataccttagcggggcgtccagaagagccaggtcgggctgtccccacctctgtaaataaatgaacgtgggttttacgaaagtttgaattgtcgatagttgccactggctgccgccacaaaatcgcatacagctggcgcgcctgtttgagtgtgaactgctcacctaacactaataagatcgtaggagcatagtccaggcgattgcgcacacgttgtagggcgtttcttaagatcaggccatgatcggcggttaacaactgcttggcgattcgttgataaaactcccgctccgtctgcgaatcgggaacaccagcaaatgccaaaccatcagcgaccagatcatcacgatccacccgcggcgtaatggcaaaccacttgacatcgcgcgcaccataccccggaactagttccggcttgactggcaaataaaccatatacgtcaacgccagtgagcgttcacccggcacgcgatcgaccgcggtaaacgtccctaactgttctgtatggaattgggcaagctggacgcccaacttctcacgaactaatcgcaatgcggcttcatccgcactctcatccgttctcaaatacgtcgtcggtaatccccaggtattctcaaaaggagcgtgatcacgctgaataagcaggaccagcagttgcttggtcactgcatcgaaactccagattacgttcgtaatactgattaatggccgataactgacttcatgcgccattcaaatcgtcctcctacaaaaacggccactggcaaatgccgtggccgttgtttattttttaattcattgcttgtagcgcttgaaccgtccacccgttaatggctgacttttcaataattgctttttttatttcccagacatccgctttgatatagcgatgtcgggcggtcattaagggaatatcagtgtagacctcttgaccgcgattaatggtaacgcgcattgaattacatcctttcctaatgctcaggaaatctgtaaataattctaatactcaatactggggcaagtacatgatactaaaaattaatttatccaaaatctgaggtaaatttaatccggcagcgtgaagtccaccgaactaacaattaactttatcatatttttgaagttatcgctaacagaatgctctttctttgacttaatttaaatttagccctaataatgaaggcgtttgcattgtgtaaaaacagattccgatttacactaaaggtaattttataagggaggtttttacatgcgcaattataaatatgccgtatatggcggtatctcagttgtttatttaattaccctatatgcgttgtaccaccttattcgaacggcttatattctattctttctctagcccagaccaacccgctgacttcaggataacgatcatcaaacaagctcatctgacctgactaaggccggatgagcttgtttgattttgattctaattgcgtaacgtgactgactcacagtcccaaaccaactattgattagcagagccccggtcatatcatcgatgccataaaaagcggtcaactgccagtgctaccttagcattttcatgtaactggctgtgctgcgcatgggccccataaaagtctttttcggtgtaatcaacatcccgcccacgcaataaatacttgatggaacgggccgacacgttggtgaccaagctgtccgaatgactaccatcgttcaaggttcccacgatattcaatagttgcacatttttaggaaaattgctccgcttggctgccaataattcataggctgcatgtaaatatttcggttgcccagaagtcagaaacgagttctgattagcaacatcatcttccccgaccaccccatcaaacgggccagcgatcgtcactaacttattgatcttcggaaaagtcgtcgtttgttgcgtcatcagcatattaacgctagcgacacagcccgcagaatgggcgacgatattataatgtttaaacgcgtgctgttgttgaaccgtggtaatcaccttagccagccaagcactctgttggtcatactgggccagattgttcttgaacacgacttgaattatcgggttacgcacccgaccacgccatttacccgtcaacgtcacttgaccactggtactgaccgttgccaccaaaactttgtgagcatgagcagtcttttcagcatgcgcaatcagggtattcgttgatttcgcactcccctgaaacccgtggacgtaaaatgtgggggtctgttgattcacatacggcgatatttttttagtacttgccgcccgttgcgttgcttgttgcttagtggtttgagaaccacaaccggttaagccaacgactaataagactgccaccagccaccatttaatttgtttcactttatccgccccattaatattttgaaatattctactttaattaaatctaagtcaattgaactcacattaccaatttcgtttgacagcgaccaactcatcttgtaaataagtgcttgctaactgcaagtatgtcacgtgtttgccaggcgtgggtgcatgtaatagccagccatcaccggcatatagggcaacgtggtgtaccgcaccgttcccatgattatgagcaaagaaacacagatccccaagctgggcatttgctatgtcgaccgccactccttgcttgatctgatcctgagcatcgcgcggtaagcgaatacctagactgcgatgcaaggtatagacgaatccagaacaatcgaaaccataagcactgatgccaccccataggtagcgtaaatccaagaattcttcaccgagtcgaacgagtgtcgctcccggtgtcaagcgcgcggttctaaatgcaaactgcgtcgcacgttttgcaattttgcccgttccgagtggggtctggaccgtataataacgatgatctttgctactaataacgggtagttccgttccaaggctaagatttaagaacgtacggccatctaagcatagtaacggcgtaaagccacgccgtatcgtaatcatcggcccagtttgaaccggcaatgggacggtcgacaattgcgccgcccatacccatcctggatacccctgtggatgccgggagtcggcctgattaacaacgtaaccataggcccagccattgacaaactgttcgactaaaaagacgtcgttaaataacgcctgcgtcacgatgcgattgtcgcgttccaaagccacagtatcttcatctgataactgcgccaaccatggttgtaagccgacatttgctagtgccggagtatcgatggacgtattgtttggctgccgccacacgttcgcaacggccgcaataatccgtgttgattgcattctagtcacctcattttttcagtttaccatatctccggaaccacgtctggcttcctggtcaaaccttgaagtgattttaactttaatcgatcgccccccaccgccgtggcacctcggcacgttaagaagctatcctttcagtagaaactttacactaaatattaaaaatcactgtgaaagtatgctatgatactaataattacttaggaggcgttttaacgatggataaaaccgatttgaagattttgaacgccttgcaggccgacgcgcgaatctccttaaaagcgctcgccgatcaatgcttcatttcttcgcccgcaatttccgctcgcatcactcgtctgaaaaagagtggcatcattcgtgactatcaagcaaatcttaactttgaaaagctcaattaccacataaaagcctatattcaactccaacttgaaccaacgcaaaaggagcgcttttacccatttgttgccggcattcctaatattctggaatgtgactgtatcacgggtgaatactctcaaattttgaaagtgattttcgaatcaacgcaggcattagacgagtttgtcaaccaattacaaacatttggaaaaacgagtactcagatcgtcttttcaacaagtgtccctaaccgtggcctcacgttgcccgatgatcacgacatgtctaaaattaatcattaatccgcatgcacagggaaactgtagcttaataggcgcaccgagaaaccatgttagtttctcgatgcgcctatttaatgaattccaattgcaatgtcagagatcggtagcccgcttcaaatcaaacccaactatcagttatgggcacctcaggaccaattcaataacctaaaaatcgcttgtggtgtcgtcacttgataatgacgcttgagaacttctaagccaatattacagcctaccaatagactcccacctaaagccacgcccacccataattgtggtcccaaccaatgaatggcaactaaactacacaaaaataacaccgcaccaacaatcattcctagcgtgtaactcacaaaccatcgtctcattgggcacctccacgacacaaactaattacgcgaatcggttcatcacataaattgcaccaagtccaattccccataaaactaacagcggtagtaaaacgagcatgccgaactggtaccaacctaataccatcataaataaaatctcaacactatggccgaacactaataattgaaagtattcacgaaaataccactgcacgccgataccaatcaagaaactaatcaagatcacaccatagaacgttccatgcagcattttacaaactcctttttattgcgtttgctatctaaccttacatggtaagtatgccgtattgaggcctaaatcatcatcatatttatgtaaagactaggttatttttcagtaaagactgtttgatgatttttaaattattgcaaactgctgttaacagttacctgcgtaacgtgttatgattaaaggacaaattaattaaacgcaacaattatgggggcgcactgtgttacatctacttacgctatcgagcttaggccgagatctttttaatatcaaaatgctaattgtcattctcattacaattggcctgatcaccctaatgaccattctgacctacctcctagagcaacaggtccatcgtcgtcaaaatcgatattggactattggggcccatggtgccgaggctttaagtgtcctcattagtatgatcctattacgacaaatattcattacgctgaattcaggtagcattatcagttggacctacgcaacggttcaattaacgattcttctgttcagccttaacaccatgcgcaacctggccgttgaaattattaacctgttaatgccattgttcatttatggtcaggccatctggttgggccacagcacgcagtacctgccagtttttctggccatggccattatcttgattagtacagtcgtctatattactcataactatcaagaattacacgctactcaatggaagtatctcctgttccaaatactatatagtggcacttggtggggcgttatttggtcagttcatccgttcaaattgagccatacactcgtcatcattctagcctttgtcctttacatgtggttgattcgtttagcagtcaatcgcgtccaaaagtttttcaatgaagtgctcacctttgatcaacaagtcaattacgatgaattaaccggtattcgtaaccgcgccagctttgacacgcatgcgcgtgaagtgtttgccgcgtatcagcaccatcaaatggggcccgtcactatggtcatgttcgatattgaccactttaaagcctttaacgatcagtacggccatctggctggcgacgccgtactccgacacgtggcgcattttgttgaacttgaacttaatcagcgcagcactcacggtcagatcttccgctatggcggtgaagaattcgtcatcatttttcgtggcatctcagcgcttgaagctggtcaaataatgcgtacgattcagcgtaaactgaaaacagtaccaatcaaatttaacgttcaaacgttgaacgtgaccgtttcaattggcatttcagaattgcaaccaactgaccagactttcactgattggttcgtccgcgttgacgactacctctatcagtccaagcaggccggtcgcgaccagaccacggttgaaagtcaattactaacggattaataattgttcccaaaaggccgttaatttgtaaattcgttcccgatttacaaattaacggcctttttgggtttagcgattaccgatggggacaatggcgcgctgacggtccaataattactgaatcgccagcagtccattttcaaattaactagtcagctaacaataattttctcctaatcaggacatccaaaaacagtccatgcttgaatgtctatccacagacaagcccaagcatggactgctattaaaaaggataagaattagccttgtcgttctttcaaactgagtttctcgacgttcaattccttgtcaacccagccattcacaaaactgctctcatgactaaccaagattagattaccttggaaagcctgtaatgcacgcttgaggccttctttagtttcatcgtccaaatggttcgttggttcatccataattaagaagttacttggaaccaattcaagcaaggctaatttaaccttagtctgttcgcccccactgagtaagtgcattggcttcatcgcattcgccgcattaatcccacacttagccaacttagtccgaattgtcttcggtaacatcgtagggtattcattttgaatcgtctgtaacggtgtcaactgtgggttatcccattccaaatcttgattgaaataattgattttagcagatggcgaaaaatctgacttaccacttaacgctggaattacacctaaaattgacttgatcaaagttgatttaccaaccccattaaagcccttaaacgctaatttttcaccgttggtcatcgtaaaagttacgggttccaacaacggctttccgtacccaacagacagcttcgtcacactcaatgcattttgagaacccgtatcaaggtatggaaaggcaaacttggcgtgttcattttcactcggtggatcaacccgatccaaatgcgatagcatcttttcccgtgacttcgccatcgttgactttgaaccggccttgttcttgcgaatgaacttttcggctttttcaatcacaacttgttgcttttcaaacgccttcagttgggcttccttacgcgcttctttttgccgcatagccgctttaaaatcgccccggtacttaataattttaccgaatgccacgtcacaaatacagtttgtgacctgttgcaagaaatcatagtcatgagagatcaccataacggccccttcaaagccgttcaaataatcttccaaccaactgatatgcgccgtatcgaggtagttcgtcggttcatcaagaataatcacatccgggttttccagcaatagtttagccaagatgatcttcgaccgttgaccaccagacatctcactgatgacgtgatcccgaccgatttcatctaatcctagtccggtaattacccgttccatttctgtctcaacatcataaaaattattggcttccaaggtctcctgaatccgacctgcacgttccaataactggtcatccatcttttcagcataatccgcataaagttgttgcatctgcgcatctaaatcatacaagcgttgaaaagccgttttcaaaaaggcgtatagcgtcatgccggctggaatatcggcgtattgatccagatagccagttcgaacgttgcgctgccacttgatctgaccagataatggtaagatctggccagttaaaatcttaattagggtactcttacccgccccattttgaccaacgatacccatatgatccgctcgttccagcgtaaaattcgcatcgtcatataatttacggtccgcaaagctttgcgataaatccgttacttctagtaaagccatgttgttttcaacctacactttcattttgacccgtattaaaacgggccccgtcatatcacgaggcccgttgcgatagccctgatactaagctagcaccaagtctttatctagttcatattgcatatggaagtacatccgatcaccgataggcttaattcctaccgattcgtaatgataacggtcatagagcttcttagctcctaaattagccatgtcaacgttcaaaccaatccgcttttgaccagcttgtcgcgcgtatcttggcagggcggcgagtaacttcccgccaatcccatgaccctgataattcgggtcgaccgcaatcgaatccaggtaccattcgtgctcataactttcagcttcagcttcaaatgctgaaccaaacgcatcattattcgcagtaactcgtgctaacacgtcgtccaccgcgtcctcatttttgtcaggataaccaaacgctaccccgaccacttgaccatcggcctcggccactaccgtcgttgccttaccagacaaataatcaggtgtccggtaagcggcagtaatggcctgctctaagtcaggttcaggaatatcgtctagttcctcaagttgcatttcatcaaaaatcatattaattagcggtgctatctggcccgcgtcgtcttgatcggctggtcgaattgttatcacgaatagccctccttcttatagtaacacctacattactatgaaaagcaagcattgtcaaaagtcgcgttcggtgtgaacggttacagttgttgttttttgagttgcttcctaaatactgtcacatccgtcccattatcaatcgtggtatactgaataacaccgtcttatactcattattattggcatgaatcatgattaaaacgtaccagttgtgtcagttcaaaagcagccagcttaggcccgctggaaaaagatctatttagcgtaaacttgcttagttagcgacgtcctacaccgacttccaggcatttctgccaattgctggaacgcggtggacacagatttaagccgcagatcacgtcttaaatactggtcttccactaaccaagccaaggacgcttgctaagtggaatttcaccgctgagcattggccgaaacgccttccagtcgggacagtattcgaatggctgacgaagatgtacccaacctttgatggacttatcattgttcctcataaacggtaattttgttaattacctgtcagtctgaaagtgatattgtgggagctcactattcctcaagtggcatagtaataatcgaacgtctcgacaaagtggttaatggaaccctgacgtttcgtttaaggttccggtgtcaaaatagtcagcgacaaattttaccaagttaagtggccgttaatctgccattcgagggggttccaaaaacgtgttcggtgccgctaaagcctgtgcttgctacgccaacggactaatgcccaaaccgcattaatccgttggctagacaatgctcggcttcaacccgtggcctctcacaggcttgagactggaggggctgggtgacaatgctcagtagccaaattattctaagctggaagtggtctgcttccggcttagaataagactcgtatttgagatgacgcgggttatgcgttagctcaaatcgatgtcggctgcgttccagcaattggcacccagccccggaggtcggcataggacgcgcaacggctgacgaacagcaatctaactggtacattttaatcatggttcatgccaaatctgatgagtacgacacgtttaataatgaattatttttgaagggatttgagcttgtgaatattcgcgatatcgatcatttgaccctaaccgttactgacattgcacggtcattacggttttaccatgaagtatttgaccttcccattgtgaccttcgatggtgaccgtcaagctgtcttagtgggtaaacaaaaaattaactttcagaccactaaccagccacaccaacccattgcggctaagccgacacccggcagtgcagatctttgcttgattgcgaaggataatattgatgatattcagcatcacttaaagagttatttcgtggatgtgattgccgggccggttgaaagaactggtgcccacggaaagttgacgtcactgtatgttcgtgatcctgataacaacttgattgaaattagtaactatcattaaaaaacaccacaaagactaatcattaaaaacgcccagggcaactgttcagtaacttgcgaacaactgccctgggcgttttttgatcgttatctggatattttagtcaatcgttgatcaatctgcactgctagctgtgtcattccagcggctgtcagtcccgttgcttctggataaatcagaactcgcgcactagcttgtaagtccaacacggctgccactggtcgactgacgaccagcaattggtggtcggtcaccggtaagtcgtccgcggttgcaaccctgaccttaagcatcgattgagttagcgcctgcattagtcgcttgactagtcgtgcatcaagtgccgcgtcaatcaccatgcttcctgaaactgaattctgtaaaatccccgttggcgttgagttcaatactaatacttcgtcaatcatgttaccgcccccctataatgccaatagtatatcgtgggagtcagtgggaagcaatcaaacgcactgtccccgcatcaagttgttcatttgctgtcatccgttgcctcgataaccaatgcgacaaaaaaagttccgcctaaatcgaaaagatttagacgaaactttttcaataaacccaacgtcgacagcgcgtaacttattcagctgcgccaatcaaatcaccgctagtcacatgaccagttggattaagggttagtttgttaacgtgatccatattggtgataacgaccatcatggttgtcgctttaccggctgacttgatagcagccaagtcaaccgtcgctaccgcagtaccggccgcaatttcatcacccgttgccacgtgtaacttgaacggcgtaccattcatttccacggtattgatccccatgtgtaataagacttctaaaccactcgtcgtcttcaaaccgatagcgtgtttggtcggaaagacacttgtcactgtcccactaaccggagcaacgacttcaccatcttcgggttcaacagcgtaaccatcacctaagagtttaccagcaaacgtctcatccgcaaccgcactaatcggcattaattgtcccgttgccggtgcccgcaaaatcgttgtcaccggcgcttccgttacagtagcagtttgcggttcaagcggggcctttgattcagcatcagatgccggggtcgtcgccacctgaccagaaaataatttttgtaaagcctccgcaacgaactggacttccgtaccgatcacaatgtggatgttatgaacatccagtacgttcaaaccaggcacgccagcagccattacggccggctgatcaactttttccgtatccttaagttgtaaccgcagccgcgtcgtacaattgttgatcacactaatattgtcatgaccaccaatagccgcataaatttgctttgcttggcgcatatatttatcatccgttgctgcaacggccaccgctggactagcaggtgcacccaccccatcgacatctgcagacacaacttcacgaccaggcgtcttcaaattaaaccgcttgattgcaaagtcaaaaccaaagtaataaatgacggccatcaccagcccttgaaccagtaacatatagggttggttggctaacggcatccgaaaactcaataaataatcgactaacccgccactaaacgaaaagctggcggtccagtgcattaacgcggcgaatcctaatgatagtcccataaaaacggcatgtaataagtagagcggccatgccacgaacatgaatgaaaattcaagcggttcggtcacccccgtaaagaacgacgcaaacgcacccgctaacatcaatgaacccacttctttttttcgttccggtcgtgcattacgataaattgcatacgcaccagctggcaagccaaacatcataattgggaagaatccagcttcatacatccctgtgattcctttaacaccatggctggcccagaaattgccaatatcattgataccagcaacgttataccagaatacggaatttaaggcgtggtgcaaaccagtcggaatcaataaacgattgaaaaagccatatagaccagcccccacgaaacctaattttgaaatccccgttgcaaagaggacaatggcatcgtagacaaacggccaaacaaggtacaataccgccgtcacaatcagcatcacaaaagcagccataattggcactaggcgtttaccactaaagaatgagagcgccattggtaattttacttcgtggaaccgattatagagcgcagccgcaatcagtccagcactgatcccaatcagcacattgttatctaacgcgctaaatgctggattgatctgactcactttaacattcagcatcgtcgctaatgtcgctggttttaacaccatcaccggaacttcaaacgcgatcaaaccagcaatagctgccgcgccgtccttattgactgacatcccgatagctaagccgactgcaaacagcaaggctaagttattcaggacaacgttaccaccctgaatcaagtaatttgcaaacagccactgttttggcaggtaattaccaatcccaaccaaaatcgctgctgcgggcaacgttgcaatcggcagcatcaatgactgaccgattttctgaaaatatgtcttcataccaatttctcctcattctctttttaagcacgttataaatcctatcacaacatgttttcattgcaagtttacaaggttatctaagtgtatagaccaatgtcaaagaaaccgatttcaaccttactaaattaagtttttccgcccacaaaaaaagttctgaaaatactcagaactttttcattaataatcttatttttcagcaacggggatttccgggtgccggtattgccgcatcatttctgctaaatggacttcgtgagtcacaaactcatgcacgcgacaaacgtagtcatgttcccgcccaatcctagcaatatagccattaatataatcaacttcggttggccgtccctttgagaagtcttgatacattgatggataatggtacttataggctcgactgaccgtttcaaccgagtcgatttcttcttgccgcgtctcaatgagtttgatgcctgccctttcgcaagcatcataggcttcgttgaacatttgagtcgccatatccttgacgcccggatattcgatgaattggcccatctgaatctcgaacatcgtgcacaaactattggtgaccgcgttaaacacaactttggaaatgcacatgcccataaaattatcagaccaaatcggatttaaatcagccgccttaaaatcggccatcacttgcttagtagtcgtatcaatgggacctgcatacttactcatatgcatcgcctcactacccttaggccccataaaatcaaccgcacccggaccattcaagaccgttgcaatcatcgccgtaccaccaataatgtgattttccgggaaatattgtgcaatcttttcaaagtgccccatcccgttcattgcggcgaaaacgtactggtcctcatgaaataacgacgcatcgcgcttgagctcatcggctaactgcatttgcttcttaaaaacaatccaaacatctggatgaccctgatattcttcaggataataaatattaattggaacgacatggtgattttgatgatcacgcgccacatcaacgccgccctgctcacggacctttgcgacgtttggttcccacgtgtcgataaaatcaacgtcaacaccggcgttttcttgtaacattacaccataccgatatcccattgcgcctgcgccaataatgccatatttcataagtaaaaccatcctttcgtcttgcccactatgtgtatatgttccccgctcgcttcagtgcttttccaataaacgggcccgtgcttacgatctactatgtgctgtcacgtgatgtcgaacaactatgtgtttacgatgattaaccgcgatgcgcgacctaaataatgactactatgtgttaactaaaaaataatgctatgtgtcacttgacgaaaaagcgccctttgaataatcgatcaaattatccaaagggcgcttacgcgcggtaccaccttattgctaaccgaactcacatccggctactcatcgcgttcacaacaactaaacgcgtgcacaataatgggtgctaccagtgaatctcgtaaaattcacgccaatcctttaacttttactcacttgtcatcacaccttcacagcaacggcgctttctgagcatcacaagtcagttactccttaaagcattatagcttttcatcaagttttaatgttataaccataatatcattttagtaaaatgtcaaccttcgatgcaaaacttttttaaaacccagctgtctgtatacgacagtatcatcagcaaaccgcacacgggcaaccccaacggcctattgtttttgctcctgattgagggtcgtcaacaatggcttccaatctaatgaccagatcattccgagcgcatggtctccagtcaagacgcctaaaactggaccgataaccccagtcttgacccggactgctggaaactgataacgtagttcgctcgcccaatcttcggcaatctgcgcgtcattagcgctgatgacgtccagccgaactggtaattgactgttcatcacaaactgactaaattcatcttgaacagcctgttgtgcatttttaagcgtccgttccttacctaaaagttgaatcttcccatgcccattgaacgtaataatcggcttattgcgcaacaccatcgttccggccagactactattgttataaatccggccatttttaactagatggcgcatcgagttaacgattaagaccgtcgtcgtagccgcccgcaagcgcgtcagttgcgcaataatttcatctaaggtatagtccgccaatgccatggccgcagccagcttcaccatgttcgccgtccccgcgcaagcagttcgtgaatcaaacacccgcacgtcaataccgtcaactgacggcgcataggtcttcaaattattgatccagccactgataccactactcaacccaataactagaatttggtcatagcccgccgcttgcagctgatcaaaaacgacttgcatctctggcattgaaatttgagaaatcgttggaatttctttttcaacttttagtaatcggtaaaattgatccgtcgtgatatctacgttctcgtggtaaacatgattaccgaacataatcgggtcgttcaccaccgtaatttggtagtctttcaccgcctgcgcttttaaattagcagaactttcggtcaccaccgcaattttcataatttcactcctcatcgtgtcagtcaaccaactgccacgtctcgctaactcatttcaattagctcatccacttagccatggatatcccatgggaacttagcatcaaaaaaagacgctcagatacagtatactgtacctgagcattctttttcaaattgcaacatttatgggagatgttattgaattttcggtcacttgcttccagtccgttgtaccggcaattggtatcaaagtcagtggcaagttcgcacgcagctttttgcgtttcaccgcacttaatccagtaatctgataacaatcatcggcaatcgtttttactgagaaatcagcttcattagcgtaatatttcacggcttctggtgcgaccggaccaatgcctaagtatgtttgtggtaactggtcaaatcgagtgaccgttaacgagacacttcttttctggttacgaatcattcgataaccattgataaggtgcttggccgctactaagacgtcatttagaacactattagccgtcgccgtacttcccgcacccggtccggtatacaagctggtaccaatggcttcactttgaacagctacagcgttttggaccccattgatctgactcaggggttgatcaaccggcacggccactggcgccacacgacaatacaaaccagatccgtgtcgctgaatctgcgcgagcaatttaatctgccagccattttcagctgctaatcgacaaaccgaagcgcttaaatgcgtgattcccgtgggtgcaatctgcggcaggctcaactcttgcccaaaagcaaagcgactgaggatcatcaatttgtatgccgcatcaatgcccgcaacatcattagtcggatcagcttcggcgtacccggctgcttgtgcagtagctaaagcttgttcgtacgattgcccggttgccattgcacttagcatataattagccgtcccgttgatgattccgctgaccgcctgcacattgtccgtcacgtaactatctgttaatgtccgcaagatcggaatcccccccgcaacactagcctcgtaaaataaatcacagccctgttttttggctaacgcagccaattcaggtcccgccgttgcaattaagtctttattagcggtcacgacagccttaccctgattaagtgctgccacaatggcctttttagcaattgcgaccgtccccatgacttcaatgactagttggatttttcggtcacaaacaacgttcgttaatgaatcggtcaagcgcgtcccaatcggtaactgaacagtccgaggcgcgttcaaatgattaacggcaactgctgctaggtgcaaccgaataccctgcgtttgttcaattttggcagccgagcgggtcaaccgttcaaccaccccactacccacagttcctaaccctaacatgcccacttcaattgtcgttgtcattgtcgcaccctccgtttcacatactttcaatcatcgaccattccgacctattaaacctgtgccaatgcttgatccaaatcagcaattaaatcatcggcattttcgacacctactgaaattcgaatcaagtcaggcgttacaccagctgctaacaattcctgttcatttaattgcgcatgcgtggtggaagcgggatggataattaatgatttagcatcagcgacgtttgctaacaatgaaaagagttgtagatgttcaattaatgccttaccagcagcctcgccaccagtcaagcccagggtgaagatcgaaccaaccccattcgggaagtacttagttgctaagtcatggtacgggctatcttccagttctggataattgatccaggcaacttttggatgtgcttttaagaaggcaacaatcttgcgtgtattggtcacgtgtcgttctactcgcaatgacaaggattctagaccttgcaacaacaagaaggaattaaagggactgatagttgcaccggtatctcgcagcgtttccgcccggaccttagtcgtaaaggctgccccgcccaaatcggcaaaaacgaggccgttatattgcggatctggcgttgtgaaatctggatacttgccactcgcacgccagtcaaattggccgccttcaacaataacgccacccatggtcgtcccgtgaccaccgataaacttagttgctgaatgtacgaccacgtcggccccatgttcaagtggccgaactaggtatggtgtcccaaaggtattatcaacaataaaaataatgccatgatcatgagcgatttttccaatggcttcaaaatcaactaagttaatgccaggattaccgatactttcaacgtacaaggccttagtatgatcgttaattgccgtctcaaaatttgccggttcgtcaggatcaacaaagtgcgttgtgatgcccaacttctttaacgtcacgctaaacaggtcataggtcccaccatacaaggtgttggccgccacaatttcatccccctgttgcgcaatgtttaaaattgccgcggttatcgcagcagaacccgttgcgagcgttaccccagccgtcccgtgctccaaggcggccactcgtttgtcgaccacgtccgtcgttgggttcgtcagtcgtgtataaatattgccggcatcagtcagggcaaagcgacccgcggcttgcttggcatccttaaagacgtatgaagtcgtttgatagattggcacggcccgtgcgcccgtttcatcaaccgtctggcccgcatggacttgtaacgtttcaaagtgataattttcaggattcgttgttgtcataattaataacctactttcgttaaattcaaagttgctaaccagttttgatacagttgattgcttgaagtttgccaactataatcaactgttgttaattgttcagtagcaaagtaatgttcaggtaactgaatcggcaagtgcttacgtcggtcgcgcaaatattcatcggcaagtgtgcggcgttcgtattcaggatgaccggtcacatagaccgcgtgcagcttgggggcagataagacgagcggtcccaccttcggattgtcagcgacaacctgcaatccagcgggtaagcgttccggcatcactagtgctgtatgccgtgactgtggcatttttagtaagcctccagcattcagtccgctaatcagcggtgacttaacatcagtactagtcgcactataaataccgaatatcttgtgagcaacgtcacgctttgcgattccaaactgtgcgtatagccctgcttgtgctgcccagcattcaaataaagtctggctaacgtgctgtcgtgaccaatcaatgattgttaacaattcgttccagtaatcgactgcttcaaacggtaacgtctcaactggcgcgccggtgacgatcaagccatcaaaatactgatcttgaatatcagccaacgtcacgtaatgtgccgcgaccactgcttgtggcaggctcttgaaatggtgactagcgggatacataaacgtcacagccacatctgtgttaccggctgcaaaacgctttaggaactgccgctccgtcgttaccttagtcggcatcaagtttaaaattaaaatctgttgtgcctgatgactttcttgacacgttgcgttcgcccattctccacgggccgctaataatccattatttgctgtgactgtcatctaaccgctccctctcacctgtattgaaacaaaaaaaagctcccatccattagtctctaatatgttagaaactaacggacgaaagctttcgcgttaccaccgttgttcgctgccatctcacgatcacaacctcgacgagtaccctgaaaaatctaggaaaccccgcaatatatcggttgccaccgcatgcgtagccactacgacccgcatcatgactccaagctcatcttcaccgcactcctgaatacttctctcaccattacgaagctctctgcaaatcagtgatgcgattactcttctcttcaacgtcttaatctgtttttaatttaaaactaatttaacaccacctttattcattgtcaactcattttattgttttttcgttatgttttacttgaatgcttattcaaaacttgctgaataactaaaatcaaaagcagccagcttaggcccgctggaaaacgtgcgagttagcgtaaacatgctttgctggttcgtcctaagccaacttacaggcatttctgccaattgccggaacgtcttccagtcgggatagtattcgaatggcggacaaagatgtactcaacttttgatgaattcgtcgttgctttttataaacagttattttgtcaatcaactgtcagactgaaagtgatattgagatagctcactaatcctgaatcggtgtagtaagatttaatctctcaacagaatgctttaatgaacctaacgctttgtttaaagtgccagtatcaaaataggcaccgataagttgcgctaagctcggtggtcgttcatcagccattcgagcggtttcccgaaacgtgttcggtaccactaaattctgtgcttgctacgccaacagactaatgtcaaaaccgtattaatccgttactagacaatgttcggcttcaaccgtggcccctcacaggcttgagaccaggcgggttttgctcgggcttaaatcgacgtcggctgcgttccagccattggccccccgccccggaggtcggactagaacgaacaaatgccgacgaccaagcatccgcatctcacaagattttcaccacaaattttaatatttggtgaaatttatccttgacacttttttcgactttgcctatactgaactcattcaataacgaaagcgaggaaccaagcatgtcaaagtcagttactaacttgaacagttcatggcaaagccggccgttcagattgtaatgccgtccacacggatacaatctggcaaacagtttgtatctgtgccggctcactttgatattcaaagaagtctgcatgggttttaacacagcaggcttcggttccgtaaagggcaaaccagagcttactggtttgcccttttttattggctttgaacttgcccgagcttaagaaattttttgaggtgattagattgaaacgtatgattgcattcattagtgccttgatcgtctttctgggagtggcctttgtcatgacaggcaaaaccaccgccacgaagacgaccagtacaaagaaagtgccgacggtcggcattcttcaactccagacccaccccgcactcgacgcgattcatcgtggcgtggtcgctggtctaaaggaatatggttatgtcgatagcaagacggtcaaaatcgactatcaaaatgcccagggcgatcaaagtaacttgaaaaccatgagccaaaaattcatgaacgaaaacgccgcgttaacagtcggaattgccacccccgccgcgcaggccctcgcttctgcggctaacaagcaaacccctgttatgttagcaggtattactgatccatcgggtagcggcctaattaaaagcgaccaacatcccggtgccaatattacggggacttctggtgaatctccattgaaatcccacttagacttgttgcggaagctcgttcccagcgctaaaacaatcggaattatttacaccacttcagatcatggtggtgaatataacgccaaaaagtttgcacggatttgtaaacaggaaggtatgaaatacaagttatatactatctctaacaccaacgatatgcagcaagtggctgaaaccatggccgccaatgtcgacgccgtttatgcgccgcaagataatggcgtcgcaagtgccatgaaaacgctagtctccgttacaaataaggctaaggtaccagtcattccagccgttgatacgatggttaaagcgggcgggatcgcaaccttatccgttgaccagtatcaacttggtaaactaactggtgaaatggcagcccaagttttaaagggcaaagcaactagcgactacccaatcaaagtcatcactaagggtaagatgaccatcaatttaagtgaagctaaaaagctcggcatcaagttcccagcaagtgtccttaaagaagccaaagcgaaaggggttatttacaaatgagtatgattgtatcgagtatcggccaaggcctcttgtgggcaaccttaggcgtcgcattatttttgacatttcgaattcttgattttcctgatatgaccgtcgaagggacgtttccactcggtgcggccactgctgtcatggcgattagccatggaatgggccccgttaccgcttccctgttagccttcgttgcgggcgcgattaccggcctggtcaccggcctactttataccaagggtaaagtgcccattctcttagccgggattctagtgatgaccgcgtgcttatcaatcaatttgcgcattatgggcggcagttccaacgtttcattgctaggcaaacaaactattttttctaatcactttttggaatcactgcctaaatattttgacagcgtctttgttggcctagtagtgatcagtatcattaccgtgcttctgattgtcttcttgcaaactaacctcggccaagccttcattgtcactggtgacaatcgtgaaatggcacgttcaattggtattaacaccgataacatgaccatcatgggattgatggtctctaacggtatcattggcctgggcggcgcattaattgcgcaaaataacggttatgccgatgtcagcatgggaatcggaatcatcgtaattgcgctagcctcgatcatcatcggtgaagttgtctttggtgaattaacgttgaatcaacgactcgttgcggttaccctcggcagtattttgtatcagttcgtgcgcctgttagtcctccaactgggcttcaacaccaacgacatgaacctgttatccgcattaattctggcaatctgcttaatgttaccgcaattcagtaaagttctacatcttaatcacgttttgaagaagggagtggctcgttatgacgaacagtagtgccccattattatcattaaaaaatatcgtgaccaaagttaatccgggaaccccgaatgaggtcaaaattttgcggggcctgaacttagacgtctatgatggtgattttattaccgtacttggttcaaatggtgctggtaagtcgaccctcttcaacacgatcagtggcgagttgccggttgatagtggcaccatccagttacgtgaccaggacatcacccgactatccgttgaaaagcggaccgctttcctggcgcgcgttttccaagaccccaagatgggcaccgcaccccggatgaccgttgccgaaaacttactgcttgccagccaacgtggtaagcgacgtacgttaaaattacgccaattgaaaaagcacctgtcccactttcaagccttaacggaaacgatggatggcaacggtctttcagctcggctcaacacggcaacagaaaatttatctggggggcagcgccaggctctgagctttttaatggctaccgagcagcgccctgatctcttgttactagatgaacacacagccgcactcgatcctaagaccagcgctcaactaatgacacaaacgaatcaacgggtcacggaggaaaagttaacgtgtctgatgatcacccaccatttagacgatgcgcttcgctatggtaatcgcctgattgtccttgatcagggccagattaagtatgatgttcgtgatgaggaaaaagcccaattgaccaaagaaaagttgctaagtttcttcgatattattgaataatcattaagtccatccctattaatactgacacccagtcatcaattttttgatgattgggtgtttttttgcagctaattgtaaccgttttagttgtgaacaatttattttagtgctatattctaactagaatatttctaaactaaatggtgtcgacgggcacagctatttttcactgataatttagaataattacaaactgcccttgccgacaaacttagttcgtgttatattctatttagaacagttctaaactaaaatttggaggctttacaattatgaaagttattgtcgttggttcttctcatggtggttatgaaacggttcgcggtattttagccgctcaaccagatactgaaattcaatggtatgaaaaaggtgattttctgtcattcctctcatgtgggatgcaattatacctcgaaggtgccgttaaagacgttaactccgtcagctatgccactcctgctggcatgcaagcccaaggcgtccacgtttttgtaaatagtgaaattagtaaggtcgaccctgctagtcacagtgtgcacgtcattgaccacgccactggtgacgaacgtgatgaaacttatgacaaactagtcctaagtgtcggcgcggtaccatttgacctaccagtacccggccatgacttagccaacatctacgcaatgcgtggacgcgactgggccatcaaattaaaggccaagaccgttgaccctagcgttaagaatgtggttgtcattggctccggttatattgggattgaggcggctgaagtctttgccaaagctggcatgcacgtcacggttatcgacctattaccacgtttacttagtctttaccttgatcaagaattcacggatatcttgactaagacgatggccgatcacggcatctatgctgcagttggccaaggtattaaagcgtatgaaggtgttgacggccacgtcaccaaagtagtgaccgatcaaggcgaatatccagctgacctggtcgtaactgccgccgggattcggccagcaactggtttcttgaagggcgttgtcgacttagatgatcacggtttgatcaagattaacgaccacctccaaacgagtgacactgacatttacgccgtcggggacgcgaccttagtcccatttgccccaactggcaaggataaccgcattgcgttagccactaacgctcgtcggcaaggtcggattgccgctaagaacttacttggcgaaaacgtaccaatgcctgctgtttctggttcatccgcactttccgtctttgactaccactttgcttccactggtgttaaagaaggcacggctgacaagctgggcgttaagacggcatccgtgttagtcaccgataccattcggcctaaatttgtctctgaagatgctggcaacaccaaagtttggttcaaactaacctttgacccaactgatggtcgcgtgcttggtgcgcaaatcatgtcgaagtacgatgttactgctaacatcaacgccatctcagtggctattcaagctaaactgactgttgctgacttagcttacacggacttcttcttccaaccaggctttgaccgtccttggaatatcatcaacgtcgctgcccaaaaagcagccgcaaccttaaactaaatcaattaggccttaattaagccatgaaacatcaaacggatccctcagccacacatcgctgaagaatccgttttttaatgcatcaaaatgctagtcatcaagattgacagtataccaagtttattttcagatatcgtttcataaaataccatgctagacgttgtactagttattacttagcatgaatcgtgattaaaacatgccagttaaattactgttcgtcagccggtgcgcgtcctatgccgacctccggggctgggtgacaattgctggaacgcagccgacgtcgattcgagctaacgcataacccgcgtcatctcaaatacgagtcttattctaagccggaagaaaaacacttccagctaagaataatttggctactgagcattgtcacccagcccctccggtcgggaagccgctcaaatggcaaatgaacagccacttaacttgacacaattagtcgctgactatattttttactggaaatttaaacataacgttagggtggcgttaaccactttgtcgagacgtttaattattactatggtgatttgggaatagtaaattatcacaatatcattttctgtctgacagttgattgacaaagttatcgtttataaaaagcaatgacaagtccatcaatggttgggtacatccatgtccgccattcgaacactgtcccgactggaaagcgtttcggccaatgctcagcactgccaagagtgtgaggttcagacgggtgagactgaggattaacctagctagggcgttaagcggtgaatttccgcttgacgtcatagcgtagctaaccggaagtctcagtctgacccgagcacgtttcaccaatatggcattaaagcgtggaagaccagtatttaagacgtggtctgcggcttaaatctgtgtccaccgcgttccagcaattggaagaaatacctggaagtcggcgtaggacgcgccaactaagtaattttacgctaactcgaactttttccagcaggcctaagctggccgcttttgaactgacataactggcacgttttaatcacgattcatgacaaattaactcgcataatgcgtatcatgttaataaaagacggggattcagaaagattaaactcgctgaatccccgccttgataactattatttcaataaatatatgatgtttgagcgactttcatcaagtcagccacgcgctaataaatattaatcaatccctgagttccttgatcacccaagcctttgacatcgaccattacttcataaagtcgtttagcctgcgccgtcgcaaccagattaagtcccatcgcatccgcctcactcaaagcaatccgcaaatctttaagaaaatggcgggcaaaaaagccgggcgtgtaatcgtccttcagaatccggggcacgtaattatccatgctccagttgtcagcaccaccgctagataacgttgccaagactttttccggatcaagaccggctgccttggtatacaataacatttcagttaacccagtcatcgtccctgcaatcatgatctgattggccatcttggcatgttgaccagtaccagcatccccaaaatgattgaccttgtgaccaagcacattaaataatggtaacatcgcctcgtacgtatcggcatcgccaccgaccatcaccgtcaaagtggcgtttttggcgccaatatcaccgccggacacgggcgcatccaaagcgtgcatgtcatgttcacgcgcgtacgtcgcaattttaatggctaacttgggttggctcgtcgtcatgtcaattaccgtttttccagcggccaatccactgaaaatcccgtgatcaccaaaataaacttgttcgacgtcccgtgggaacccaaccatggtgaaaatcacgtcactcgtttctgccacggcagccggtgtatcagcccaagtggcccccgccgcaactagcgcatccgccttactttttgttcgattataaaccgttacgtcatagccggccgtcatcaggttacggacaatcgctgcccccatgacgccggtaccaatccaacctaatttcatcatttacgcacctttccttccacgcactgttcattgcggcgccgacgccaaaaatgaatcagcaacgtaataataaatgctactaatacgataccaccaaaagccgttgcgggaatatcccaaccaatggcaggaattgagataaataatttgatggcaatcaagacaatcaagcaatacgccatggtttccaactcgggaatcttgcgcattaagcgcataatgacctcggcaatgccccgcatgcaggcaatcccaatcatcccaccaatcaaaacaatcaccggattatccgaaattgccaatgacgccaatacagaatcaattgagaaaatgatatccatcatttcaatctgaatgacgaccgaccagaagttgcttagtccgaagaagcgtcgttgttgcttgggtttctgtgccaccttggccccatttttcggctgactaaagtatcgatacaccaagtacccaaggtaagccgcacctaacactttgatctcccaaaaactgatcaaatacgtgccaatcccaatgattaaaaaccgaaagatataggccccccacaagccatagaataacgatttttcccgctcttgtaaattatctaaactctgggtctgagcagctaagacaacggcattatcaactgatagtaaacactcaataattgctaacgataaaatgattaaccagtcattagcagatgtgatgacgttaccccagttagtcgcactgaagaagggtccatacaactgttcgattaaatgtaacaaacggcatcctctttctcttaatattagtttgttaatctaagtatacctgtaaaaataattggtgccgcttacgtggactaattttcaaaaataaaccttattttcgtcgtatttacgactcatcatgccaatgagtaaaataagtgcccaaaaagctagccaattgcgacctttcttattctaattgtcgaataactttggctggtaccccggccaccaacgtattatcaggcatgtcatgagtaacgactgctccagccgcaatcacaacattattaccaatcgtcacgccaggcgtaatcaccgctctccccccaatccaaacatcatgaccaatcgtgactggatggccctgggccaagttagcgcgtcgaccactagccgtcaacgggtgattgaccgtataaatatcaacattggggccaatcatcacgttatcccctatatgaaccggcgcgatatccaaaatagttaagttataattactaagaaaattatcaccaacatgaatattacgaccattatcacaattaaagtctgcttgaacggaaagattgcgaccgtaactaccaagaatctcttgaatcttggcagtttgcgcatctggatttgttgcatcgatctgattgaactcttggcataacttggcagcccgcgatttttgagcggccacctcagcatctttaaattgataccattccccggctgctaatttatctaattctgacattgttgtccctcctatattttatcaccctaattttactgcttagagtggcgtcgaagtcaacacttgagttaatggtttagcaggtgttattgacaactatcctttcggaccagctgcctcgaatttgttcagcagttagggcaacaaaaaaagaaaccgattgctcaggtttctttgcgccaattctaggccttaaaatcacgaattaattgttggagttgctgattatcgctagccgttccgaccgttagtcgtaaccaccctggccgtaagccagtgcgaatcagatacccatggtgcactaaatagtcagccagttgcgtggcactcggatacttaaagaaaatgaagttcgcgccagattgatcgtaagtgacaccctgatcatcaaagaatgccatccacttagcacgttccgtcgcatttttttggaccgtttgtttcacaaaattaggatcatcgattgccgccagggctgccacttgagccaaggaattcacattgtatggaagccgaatagtttgcatcgttgtggcatatttggtattaaaaacggcgtacccgattcgaaagttagctaacccatatgctttggagaatgtccgcatgaccactacattcgggtacttggctggtaactgcatggccgttacttgagccgcgcccggtgtaaaatcaatgtaggcttcatcaatcaggaccatcgtctccgggggtacttgctggacgaacgcttcaattgccgctaatgattccacggtgcccgtcggattgttcggattgcacagccaaaccatcttcacgcggggcgtaatggccttcattaagccttcgaagttcacatggtcattaggcaacgttggcacactaattaattgccccccctcgatctcagcatgtagtccatattctgaaaacgtcggtgcggacactagcacctggtcgttggtggctaagaacgtccgtgataacatcacgatcatctcatcaagacctacactaaaaacgatgctattcgggtcgattccctgttgctgggccactgcttgtcgtaactcctgtgcgtcggcatcgggataacgattactctgggtgaagtcccaattcttcacagcgatcgccacttttggcgaggtgccatacgggttctcgttagctgataaccggactaattctgtcaatcctaactcagcttggagggtcgccaacggcttttcgggcacatagggttctaactgttcaatactagctttcattcggctacctcctataggttcttaatttcgggccgatccttatagtcactcatcttaccttcacgtttagccaattcttgcttaatctggtcaaaactaacaccacgttcgaccaataacactaaaacgtgatacaacaagtcggctgtctcataggttaattcgtcgtcaccgggatttttggccgccacaataacttcggttgattcctcaccaaccttttttaaaatcttatccagtcccttagtaaataaataatctgtgtaggagcccttcttaggcgttgccttccgttgtttgatcagttcgtataattcttccatattttgcatattcgacaccactttcttctataatatattcatcaatttaatacgggttaaaaacaatcctgcttatcgaccgttgggaccgcattttccaaccaatcagccatctaactcccaactcattcggctatcgtcatcaatccttaggcgccctgttctagttcaaccgggttaaagaaacaactcgtatgtcccgtatgacaagcgggaccatgcggatgaactgcgaccaatagtgtatcttgatcgcaatccaacgtcatactaacgacatcttgtaaattgccgctcgtagcgcctttgtgccaaagttcttgccgagaccgtgaccaaaaccacgtctggcccgacgccaatgtccgttgatagctttccgcgttcatccacgcgaccattaagacatccttcgtatccgcgtcggtgacgaccgttgtcagtaagccgtcacccttttcaaagtctggtttcatcttacgaccactccttgttttcttaatgtcgctttgacatctgcaatcgttaactcgccaaagtgaaagacggaagccgccaatgcaccatcaaccggggttgtgctaaaaacatccacaaagtcttgtaagttacccgcaccgccgctggcaatgattggcacattgaccgttgctcccagggcctgatataacttggtatcaaaccccgccttagtgccatcgcgatccatgctagtgaccaataactcgccagcccctaaggcgaccgcttgcttggcccacgccactgcatcgaggtcggtcgcttgctgacccccatgtgtatagacacgatattgaccagctgccgcatcccacgccgcgtcaatcgcaacaacaatgcactggttaccaaatttttcagcaccggcacgaatcagttcagggttggcaactgcagccgaattaatagccgtcttatcagcacccgcacgtaagattcgttgcatatcagcaacgcttgtaattccgccaccaatcgtcagtggcatgaagacctgagctgagacttgttcgaccatggcggccatcgtctcgcggtgctcattggtggctgcaatatctaaaaagacaagttcatccgcgccctgttgctgataggcagctgcaatcgccaccggatctccgacatccgtcaagttgacgaaattaacgcccttcttgacccgaccatccgccacatccaagcacggaataatccgctttgctaacattcagtcacccccgctaattcggccagtgtcacaccgccttcagctaacgccttgccaataataacatccttgaacccactggcttgtaacacttgaacatcggtcaaattccgaacgccaccgctggcaatcaggttggccgtgggcacctgtgcttgtagttcttggtataacgcaaggttagggccttgcatcgtgccatcacgggcgacatcggtcacgataaagtgcttggcaccactcgtagtcattgtcttcattaatgtactcatcttggtctgtgactgctccaaccagcctttaattgccacataaccattggttccgtctaacccaatcacaattcgctcaccaccaaactcacttaacagtcgtttgaccagtcgtggatcagtcaacgcaactgaccccaagattaagcgatcgattcctaattcgagataacgagtcgccagctcgtaggttcgaatacctccaccgagctcgatcgtcccggtaaatgcttgccggatcgccgtgattgtcgcgaagttttctgggcgccctgacttggcaccgtccaaatcgaccatgtgtaattgctgcaagcccgctgcgttaatttgttgggcttgaacgacaggatcaggattaatcaatgtcgcctgtttaaaatcaccttggtagagccggacactctgaccggctcgtaaatcaattgctggaaaaatcatttgcactcaccatttccttaaaagctgctagttgttgtaatccgactcgaccactcttctccgggtgaaactgcatcccaatcacattttgatgctgaacaatacttggaacctggacgccgtgttgaactgtcgccacgatttcagttgccggacataccgcatagtacgaatgaacgaagtaagtataggccgcgtcaatactggcaaagggactatcaggacgccgaagctcgttctgattccaccccatctgtgggactttgacattcaagtccgttggcaaagcgctaacccggccgcttaacaagcctagcccagcatgctcgccgtactcggaactactttcaaacaagagctgcatgcctaagcaaataccgagaacgggtttgccactccgcgccaatgcttgtaacacgccgactaactggcgttcttttaaagcggccattgcagctgcgaaagctcccacaccgggtaaaataactgcgtcagcggccgctaattgttgcgggtcagccgttaagatggttgacacttgcaggtagtcaaaagctttcttcaaattacgggtattacccgtatcataatcgacgattgcaaacatttaaatcacgcctttcgtagagttgaccccctgaatatctggattaatcgtgacagccgcgcgcattgcccgcccaaacgctttgaacaaactttcaactttgtggtgagtgttacggccgtacaggatgcgtgcgtgcaaattcatttcagcagcaaaggccacggcttggaagaaatcttcgactgtctccgtatctaagccaccgagccgcggattcgtgagctcggcatcaaaaactaagtatgaccgtccacttaggtcgacactgacctgacctaaagtctcatccattggcacaaattctgtcccgtaccgttcaattccctgcttatcacccaacgcctgcttaaagcattcgccaagcacgattcccgtatcttcagtagtgtggtgcgggtcaacgtcgaggtcgccgtgacacttcacgaccaacccgaagcgcccgtgcttcgcaaataagttcaacatgtggttcaaaaagcctatcccggtatcgatttcgataccgctctgttcgtctaaattcaaactgatttcaatctgggtttctttcgtttcacgtttaatcgttgcttgtcgcatgttcatttcctcctcatctgctaaaacgactaccggctgtaatcacaatcagtatcaactactaattacgccctaatcgtaataggtgtcaaaacgactctcaatcgcacgagcatggccttccagaccttcgacccgtgccaacgtggtaatcgccggagcttccttagccaaagcgtccttagtgtattggataaaggacgttcgcttaacgaaatcatagacgccaagtggtgatgagaaacgggccgtgccactcgttggtaagatgtggttcggaccagcaacgtagtcaccgagtggttcagaggcgtagcgtcctaagaagaccgacccggcatttttgattaaattcaagtactgagttggattcttcaattgcacttccaagtgttctggtgccaccgtattcatcaagtcaaacatttcttcaacctttgcgacaacggcaatgaagcctttttcgttaacagcgtcggtagcgatcgcttctcgtggcaaaactttcaactgtgacgtcacgttgtcactgacggcctgcgctaagtcggcactatccgtaattaggattggccgggctcgacggtcatgttctgcttgactcaataagtcagccgctaattgccgaggatcagctgaatcatccgctaaaataccaatttctgacgggccggccaccatgtcgatcgccacctgaccaaagacctgcttcttagcagtcgccacaaaaatgttcccaggaccaataatcttgtcgaccgctggaatcgactcagtcccataagctaacgcagcaattgcttgagcgcctcccacttgatagatggcgtcgacgccagcgattttggctgcagcaagaacggctggattgatgtcatcgacttgtggtggcgtcaccataatgacttcattaacgccggcaatcttagcgggcaaggcactcatcagtaaagtcgatggataggctgccgtgccacctggaacgtataagccaacccgattaagcggcattaacttctgccctcgtagaacgccaggctgttcagcatcaataaagccagtcgccttttccttttcgtgaaaactcgtgatattgcgtttagctaacaacaaggcgtccttcacttgcgggtccagattgttataagcatcatcaataacagtttgtgacaacttaaagtcggtcaaggtgaccttatcgaattgggtttcgtaatccttgacggcggcatccccgtttttaatcacattggcaataatttcgcgaaccgctgattcaacctttaagtcagtcaattgttgggtcttcgtttgaactaagcgttttaaactagctaaatcttcattaataattttcattagacaaactcctttggattattcgtatcaacaactgtggccaaccgatcaactaaatcaaagatggcggcttgttgctgttttaaggctaaccggttgaccactaggcgggtcgagactggttgtaaatagtcataaatttgtaaatggttctcacgaatcgtggtccccgtctcggtgatatctacgatggcgtcggctaagccagtcagtggtgctaattcaaccgagccttcaatcttaataatttcaacatcttggcccaagcgatcaaaataccgttgggtaatcaatgggtacttggtgccgatgattttgcgtcgtggtgcaacgggatcaaagtcggccgtggatgctagcacaaattggcacttaccaacccccaagtctaacagttcatattgggtactctcgtgttcagtcaaaatatcgctaccaacgatgccgatatcagcagcaccccgttcgaggaaggtcgtcacgtccggccctttcgctaaaataaactcatatggttgcgtctcagaatcaaaaatcaaccgccgttgcttgttgcggacttgcgaacaatccagtccagcttcttccagcaacggcaggacttgttgttcgacgcggcccttagtcaaggcaatctttaaacgtggttcagtcattggtcatacctccagttaaatcaatcagttgggcattcaaacgttgtgcttcgatgcgcgcacctgctaagtcatccgccaaactcaaaatggcgtgcggttgtttcgctaagtatgcctccgcttgtgaccactgttcaggctcaaagtaaatcaattgttcagcataagcggtctgttggtcggtggctaaagtcgttaacaagtcaacgtttaaccccattcccacagccggttctgcttcagcttgaaagttcgttaacagtttgtcgtaacggccgccgctgaacaggtagccagcccccgcttgtgaataaccccgaaaagtcaggccggtatagtatttttgtggtgcttggctactcaaatccaccgagatgacttgctccggcatcgtttgttgcatccaggccaccaccgtttgaagccgtttcagacttggttggactgtttcaggtagtggtgctgccgctaattctttgaagatacattctggacgcccgaacaaacgcggccatgctttgagaaaatcgtataaaggctgtgcgcggtacttggcaatcaacttcgtgtagcgtggtacttgcttatcgaacagtgcggttaaaatggcttgttgttcgccttcgtcaccagtcaagctggccacgacccgttgtgcaaattgggcatctcctaattcgatttcaacagcatcggcaatcagctcacttgaaagctggttggcaatcgttaaacattcaaattcggctttcagcgatgcgtaaccgactaattcgactcccgcttgtgtgatttggttatatgaacctgataattgacggcttactcgaaagatatcgccgacataaccaaacttttgcggtaaggggacattcgtcgcgctaatgaagcgagcaactggtaaggtcatgtccggccgtaagaccaaggtgcgaccatcgttgccaaataagcggtatagttggtagttacccatctgatatggatcaaacaccgcttcgttttctaataacggcgttgcaattggcgcgagcccgcgttgtttaaaataggcttggatcaccgcgatcaagtgttgtttggtacgtgcccgccgaccaaattcatcccgggttcctagtggtaataagtgtttcaacataatttacgcctcctaaaacgtcgttatttaaaactaatcagtttaattcatatcgttacttatcaacgtgcttaatcaattgcttacatgctaaccggagcgacttgcgattccgtcacgcaaacttaccgcatggatcggtgaaactaaaaaacgcccccttagcaatttgctaaaaggacgtttacgcgtggttccaccttatttcatctaccgttcgcacggcagacctcatgttgatcaagtcaacttggataacgaaaccaattcggctaaggctaatgagactggttcaccttagcagttcatagatgtgtgttcgttaagcctgtctgtccggttctcagctacccgggctctctggatgaggaagacttaattacttgttctaatcacaaccgtttattaaaatttgattagtcgtttaatttataattcattgtaatcactaaactgacggctgtcaaccctcaattaatttttttataagatgatagccacgccccacactggctatgtcatgggcatcagagccataaaccagcggaatgtcaagcttttgagcgcgttgtagaatctgttcaccgggataaaaatcattacaatacggtttgtagagaccagccaaattcaaatctaactgccgccgttgctgcttcactaacgccaacgtctgatctactaattgaagattatggacatccaagggttcagtcaagccaaagtaatcctgatatttgcggacgagactcatgtggccgatccgttgtggtgcgtaagggcccagatctgcttgtactgatgccaagaccgtctgataatactgttcaaaaacacgttggggcgtcttaagccactgcccaaaaccggctgcaaaatcatccgttgacatgtcaacacaccagaaatgctgccgtaacccccgcatgaaatggactgacaaaatactttcctgcgtccgaggaccataggtattcagaaaatcacgcgtccaagcaacatgctctggtaagaaatcaacttcaaaacccactgagatctcgatttgcccggcatatttggtcttcagtccgttagccagtgccaaataatcggctacttggtcctcacgcaacgacgcctcagtataaccggccggcgtcccttcatactggtcacgaaatgccggtggtaacggtgcgtgctccgtaatacaataccgctgaaaacctagctgtatcgcccgttgaatcattttttccgttgcttcaccactcccatgcggacatagttccgtgtgggtatgcccatccattagcatatcctcatcaccctctcataatttatgcttattcaatcatattttttttagataagcaagtatggtcgaaacggtcattcgcgacaatacgctagcagtcacggcgaaaatctaacaatttacttatttatttatattaatcgtcacaatttctttataccatgatatagtcaacattagttaaagaacagcgctattcccaaaaaaggggggaccagccatgcacgaactcattacaaaactttatcaactcgcactttccagtcacattgtcagtacgttgctggaacccgtgcacatcgttatcttagctttacccatcatgaccttactactcgccatgattatcctgactatccagctccgaacacgtcaaacactgagtgagcgtaacttgatcagtacctattcgtttatttggtacttggcagcagcctacttactaattattctgccactcccgactcgctcatccgtggctagcctaacaactgctgagtataatttacaacccttctactttctcacccagttgaaggcactcacgccgtttgaactcggggaccccagtacttggttagccgccttcaaatctgacacgttcttccagccgttcttcaatattctattatttatgccgattggtgcctacttaaagtggcggcaccgctggccgctctggttgatcaccctgacgagcttctcgatttcattgttcttcgaaaccacgcagttaaccggattatacggctactactcacgagcctaccggatgttcgatgtcgacgatttaatgatgaacacacttggtgggattgtcggtgctgggtgtctacatctgattcctaatcagtggcgcaatcgcgaccacagtacccggttgaattggcaggaacaccccatcaattggcgccgcattggggcgttggtcatcgattggctcgcaattgccgcctttgacaccgtctacttcgtcttagtcaaacattttaattggccattaccacatgattttcgctggctatacctggccgatatcatcctcttcttcattgggcccgcctggtgttggcatggtaaaaccattggtggtcgcctgctcaatagtcagatcgtaaccatcagtggtcaccaggccaatctctggcaactgcttatccattacagtgggctctacctaatcggcctgccacttttattcttggatttatggttattcaatcgtctaggcaacgttcctagtgccacccttaaccgcctggatgtctacctcgtcgtcgtttcagtcattttactgattatcagttatgatttattgttagcgcttttcagtcgcagtcaccagttatggtgtgaaaagttaagtagaacaactgttaaataattaggtggccttaaaacttcctttgcgttgtctcgcaactcatgttaaattgaagatatctcaaaacgctggaagtaaaaacaatgataaaagtccacgaactaagcgacgattttcgctgggtcgctgttaataattacactgaaaatgattatcatcaactcgtaagtgaggaacacgttaccgacgaaatgttaggctacgcaaccgatcaacacgaacgaggccggttggaatatgacgccaaaagtgccatcacgaccattatttttgacgtggtcacagaagacgttgaggaaggtacttataccgcccaagtcagtttcatgttgattgaccacaccctactgacttttacgaccgataacacaatattcgttgaggatatgttggcagacgaaatcgatgccgattgggaagatgtcctgcatccatacgaccatatctttaacatcttgtacaagctatcacggcaatatttttcggccatcaacaagatcaataaacaacgccaagacattcagatgaagatgaaaaagcaaattcagcgttcagtcattattcaattgatggacttagaaacaacgctagtctatttcctcacgtcccttaaaagtaataacgacatgttgcagtcactcaaacggtttgtaccggtcaaattctcggcggcccaattagaacggctcgacgatattattgtcgaggcacaacaaggattggaaatggccaacattgcctcagacatcatcggccgggtgtcgaacgcctactcgaacattctagacaacagtttgaacaacacgatgtgggtgctgacgattttctccatcgtcctgacaatgcccaacattgtcttcggttttttcgggcaaaacgtcgacttaccgttcatgaagaatccattcggttgggagattacggtattcatcgccgttgcactatgtgccctaaccatttggttgctacgacgcaattcatttcgtaaataaaggaggttttaaaaatgcctagtcgagttaaagtcacggacaccaacgattacatcaataaagctgcaatcgctgcacaaccaatcttgagcacccttgcccaactgattacatcggaattgcttgactttactgctaaaatcaagtggaatttgccgttctatgaacatgacaaacaatacgttagcattgctgcttatcaggcccacgtcagtctaagtatttcagccgaccttgacgatgcgaccctcactgctgctaaaactgctggttacgcaaccggtcaaaagcggctgaacattggcctggatcaacccgtaccagtggcgctagttagacaagtcttacaactaattgcttaaatatacgctgcttttaatttcaaaaggttccgaactgtcaaacaactgacaattcagaaccttttattttggttattcttatccaatatccaagctatcaaaaccagtttttctgtacagtttcatcgattaaactgaaactgctaaggactatcgcttgcgcaaccgataatcctttacattagcaaatcgagacagctcaaccagttgaccggtcgccttcaaatacgcatcatattcctggtcaagaccgggaagaacttcattagtacccggtacaaaatgaatatcctcatgtccggcagccgtagcggtctcataataccactccttaaacttcaaataactcatcgtatcctgtaagtcggtaatccgctgttgtaattcctgctcatgcgttttgagtaattggtaacgatcgtttaatgtcgtatcaccttcgagtctgagcgcaataaaagtagcaatgtcagctactgacacacccgcatttttgagacatacaatggtcctcatcaaatgtagatcattatcagtaaattcacgccggccaattgaattacgcttcacgaatggcagtaatcccgacttatcatagtaacgaatggtatcaatcgtcactcctaacttatcagctacttgtccgattgaataactcatactgaactgaacctcctcgattgtcgtttaaccactatcttaacgcagctaatcgtctgtcgataatgaaaggtcctcacgtgacttaatttcactaacaatgctttgtaaattagcgagtccaccttgataggcaaattcacctaatggcaagtgtgccggtacttctaccaaattggcctgatcaaacataacctgagcaattcggtgcggattgcccggtgcctgagtaaccgagtccgataccgtcgtaatcgcgtcactaaacgcggcgtaatctgcaattgtcggtaccatcttttgggatgaccgccctgaccactgcgttcgagcgccacttggttcaaccgtcataatttgaatccccaagtcttttacttcttgccgcaaggtatcactatacccctcaactgcatactttgtcgcactgtaaaagcccatagttggtagtgtcgtcaatgccaacgccgatgataaattaataattatcccagcatggtgtgcccgcatggtcggtaaaacggtcctagtcacgttagcgagtcccataacgttaacttcaaacatgtagcgaactttcgccatatcactttcttcaattgttgaaaaatagcctaagccagcattgttcactaaaacatcaatagttccaaaacgttgaatcgcttgagcgaccccagttttaatttgtgattcatttgtcacatcaatgcttactttctcaatacgcgtcgcgtcaaaaacatctaggtaggctaaatcatcggtgtggcgggcagccgcaatcagctgagtgtcagactgacgtgcaacaattgtcgcgagttcctttccaaaaccacttgaagttcctgtaataaaccatgttttcatcttttaatcactcctattaatcttgctgagctactactttactcagtcatagtccttttagcagccttgactaacccatctaaccagctttggtgaccatttagcatcggattgggtgtttgattagctaagtctttagcaggctgtccaacttgcgattcttgtgttaataatcgaatccggccatctgtcaatttttcaattaagaaagcgtgatagacatcaaattgagtatctgcatcaccattttgccagccatgccatgctagtcgtgctgtttcaccatccgtcggttcaacgagttccatgacctgggcatcgataggaaaaccaaatgtatcaaatcggaaatgttccgcaaactttagttcagtattcgtttgatcatccaaaataatgttagtcgcattgtcataatacgtcgtccacttcgatgtatcgactaaatttttccaaacagccgctaaagtcacaccgtctgtaatgacctcgtttgacacgaaattatcagtatgccctggtaaatagtccgttgaccaattaattgatttcattattaattcctccatattcgcgttaaaattttattctagctagcaaattaacatcatgacatctcattgaccattcactaactttgaataaacttagcttatatgctggagctgactccaggacaaggataaaggacactcatcagttttagcttaacaaattcttaatattgctttctaaaacgaacctaatttcaacatgacgcttattatattttatctgactctaacgctcgaataattcgacatcaaaaaaagctggtcgccagaatattgattctagcgatcagcttttcattacccttaacaaattagttttattgcatgtgcaataaacccatcttgtccatggtttccgcaatctgaactgagttccaagcagcaccctttaagaggttgtcggaaacgttccacatgtggaaggcttgtggcgtttcttggtcaggacgaacccgaccaacgaacgtgtctttagaaccttccgcattatgcgcttgcggataaatttggttatcagggtcgtcttgtaagaccacgcctggtgcagctgccaaagcatcttgaatgcccttgacggttgccttaggatcttcaacttcaaagtaaactgattcggagtgactcactggcaccggaatccgcacacaagttgccgttactttgatatccttactgtccatgtcgccgccacacataatctttttggtttcatggatcatcttccattcttcatgggtgtagccatcttcttcaaacacgtcaatttgtggtaacgcattgaaggcaattggataatgctttttgtcgcccgcaacaggtaagatatgagcttccatctcttcaccttttaagtaggcttccgtctcatcatgcaattccttcaaggcccggttaccagcaccaccaacggcttgataggttgaaacaatgacccgcttcaaaccaaatgccttgcgcactggttccaaagcaacgaccatttggatggttgagcagttcgggttagccacgattccatgatgaagcttcaatgcttcagggttaacttcaggaacaaccaacggaatctttgggtccatccggaaagcacttgtattatcaacaactacggcaccccgtttgactgcttcaggggcgaacttcttagatactgagccacccgctgagaagagggctaaatcaattccttcgaatgattcaggaacggtctcttcaacagttaaggcttgaccattgaactgtaattgtttaccggctgaacggcttgatgccaaaagtttaactgagttgacaggtaaactcgtctgttccaccattttgatcatccgcgcgccaactgcaccagttgcaccgacaatcgcgacgttatatccactcactatgaagacctcgctttgatagttattgaaacctcattatagcacgtttgtaaagattagaaaataatgagttccatccgaccataaattaatctgtcactgattgcactgccagctgttttgcacacgcagatcatcaaaaaaagtaaccgttaccatcgttaattaaacagtcatttagctgtcgcctattttgacgtataatgaacctaattcaaaggaggccgcgccatgtgtaccagcttaacttatcttgatactgacaatcaccgctacttcgcccgcaccatggactttccaacaacgacaccttggcggccaatttttttgccgcgccgttatccgtggccaactgggttagcgacgacgcgtatgacgcagtatgccattctcggtggtggtcggctacctgaccactttaaggcttgtttgatggctgacggcattaacgaagctggtttgatgtgtgctgaactgtacttgccccacgccgttgaatacgccactcaaccacaagtcaaccaaattaatttaacaccccaagccttcatcaactgggctttaggtgaacaccaatcagtcgcagccgtgatcgccgatctgccaagtgttaacctggtcggtgcgtcctggggtgatgacactggtgaagtctatccctttcactggtatctcagtgatgcacacaccagtgccgtcatcgaacccactggtggcccactgacggcgcaaccgaatccagccggcgtcctgaccaatacaccagtcctaagcgaccatcagcgccgactaaatcgttatttagcagtatctggcaaccagattacaactgccactcgtcaggctgctcagcacgtgattcagactaagcaaccattaccgagcgggccgattcccactgatcgtttcattcacatggcacttcgacgactgggaacaccgcagctagcaccgcaacaagtgccgaccactttattccgctggttacaagaagtaagcttgccataccacgccgaccgtcgccatctcatcagccacaactacacgcactatcgttgtttgatcacgttagcgactcgtacttaccgctttattccacgcacgactggtcacgaacaacgactgacactaacacctgaaatggcaacaacctggcgaaccccgtacctctttcctgccgattgaaactaaaaaatcacgatgttgagactgaactcacatcgtgatttttaattaatgacgctgcttcaaaaaatgatcaaattcctgattgattgctgctcgtacttggggctcatgtaaatcagcttgcgctgcattcggaccacccgtaacttgactaaccacttgcaaatagccgaacaagacctggctggggtcaagatgatactgcttggctaacgtcacggcgagatcataacgatcaggtcctaataaacttgaataatccattatgccgtccctcccttcgcctgttctagctggcgactcatccgtaagtaggccaaaaagtgaaaaatgatgccacctgctagtaagattgcacctaaccataccgaccaaaacgttgccacgatggctaagccataaatcgtgacacttcgaaccggatcaaacttaattgcggtataaaaagccattgagattcccggcttctttagatcctggtgatgatgcagataagcgtacatgaaataaaatgtcgccgaaataaacagggcaaccaaatcataaacgataaatgccgtttgcatatcctgtcgattaccagttgtcaacgcatctgccactaatgacatcgggtaatccaataaggtgatactaaagagcattaataagtttagcatattaacgttgcgatcaattcgttgtagcatgttgaaataatcatgatgaaataaccacagcgtgccaacgtagaaatacgaaaagacatacgacaagatcaacggccattgcgctaatagtgccgccagtaaatgtcccggttggtaatcaggaatgtgaaattctaagactaaaattgtaattaaaatggcaaaaataccatcactgaacgcctgaaatcgatctgttttcaaaatcagcacctcccacagcgttttaggataccataactcacaagtaattactgtaattaacttttcaaactgacgaccaaactgcttctctaacacctgatatggtaagattaagtcaaaataaagtaattgatgtgggggcgtcaagacgaatgcgaaaattattaaaaccaaagtggttgttcttatttttctggggaatcgtggtgtttgcaagtattctgattttaccgaacattaccacgtttgtgaatgaacaaaccgcaatgccacaagatgcaacaacgagtcctaaatatcaacaacaatggggtcacgggttaaccaacagccagtccttaacgttagtcttcaacaattcaaatggtaaattatccaaacagcaacgccaacaaatctccacgaccctagccaaacttaatcgccgagccgatgattatggcattaaccagcttcgaacgccaaccggtatgactaatgactggcacttattacgttccaatgatggttccaccgaattagcccttgtcgccgttcagacatcccgggctgacctatctgtgattgcaaatcaacttaataatgcgattgcaatcgccgacctcaatacgagtgtcaccagtacggacttgatctaccaacaacacgtgcaacaacaacgtcgcaacttgctgattagcatgcttgtcggtagtctgctcagtttaatcattctcggcctcatcttccgctcactgttagtgccattactgaacttactgtgtcaagtggtcactctgatcacaacgattagctttatcactaacgcgcgtttagcttggcattggccactgacggctaatgcgctgagccttgctggtctaatcagtttaatactgactagtctattgacatggcactttatgtacgcgtattggcaatcgagcgcaccaaccgcaccgaccactgtcagtctcaaaattctgacacttcaatatcgacagtgggcacttgtttttatcccattaatactcataaccatcactttacactggactgccttcatctcattagccgctgcttgggccattactgtagcgcttggaatcaccttactggcggtaccgccgctcaattacgcctttaccgcttggctcggtgataatttattttggccaggaacaacggcttggccgacccgtccacgcaatctatggggccaattgagcaagttcggctactggcagccagcgcttgggagcttggccgtcgcactgttactactccccggcctcattcttgctaacggccagtttgccgatgacaacttacgaccctggcgccaaaatcagcttagtaatgctgaattaggtcagcaattagtccaagctcacttcggtaccggtgccacggcgccaatcacaattacactacgagcaccgcagaatttaacgcagcagcaatcattacaaacaatcgatcacctgacgactaaactgcgggccgtaccaaatgtggctcaagtcatctcagtgacccagcccaccggccaaccactaagtaatttctacgttaaccagcaacttgcgactatcaacattgatttggctggtaaactgacgagtatggcgaaactcaagagccaactcacgactgaccaacaaagtctggaacaagcagcgactagtcgccataccaagtcggtcgaccagttgtccgaccgcatcaatgatttggctgaactgaatgatcaagtgcaacggcaattacaggctattgacacgacgctaacgacatcagctgaggctgaacccgatttaaccaaagtcaatcagcaggtcaccaagttagatcacctgactgaccgcatgacaaccgcactaaatcacgtggtaacggcccaaactacggtcgcaaccgaagctggacacgttgatcagcgtgttcaccacgtcaaccaatcattgaagcagaccgttcaacccttaaccaccttactcgcttcactgaaaaatacgaagacctatctacatgatttagccgctagtcaagttggccggagtttttacctgcctgctaacgcggctactaatcaggcctatcaaaacagtctttttactaatattagtagtgatttaagcatgacacagctaacggtcactttgaaatcagcgccggctagtgcggctagtcgcaggaccctgcaacgacttcaggcagtcacccacgacagcctactcgccccgcccttagcgcacgccaaaatcctaacaaccggggtaacacagcaacagcactatcagcataccctgattgcgacccacgcactgagatggctcacactcggattaatcatcggcatagttgttttatggttcggcctgcgttcattgaccttcagtctgttaatgaccgcgtgcttaactggcgtgacgttaactagttggggttggacccagttaatattaacacgctggttgcaaaccgggccgctcagtagcagtgtcttgcttggtagcttgatgttgttgacactgcactggctaatgattaccaccgcaaccagttaccgtcaaagttggttacgacacttggaacccactcaactgcagcaacacttttatactagtggacgatttgtttgcccggtaacaatgattgaattgacctacttactgccactgcttttgacgaccgcaccaaccttaaaggggcttgcactcatgagtctcattgggattacgataagtaacctcatcgttccattgggattttcagggtggacacgttgggctaatgagccaccagctatagccacgctttggcagcactttcgcccatcatctaccaaccgctagcaattgattagcctaatctttgagtaaaaaaagttgcttttccagacgtcaaatctggaaaagcaacttttttacaatactaaattgaatcgtagcaaactgccagtcgtttatacttaatgattgtgtgagcaccggtaatctgatagtcaccgctgactaactcaatatcgtcatactagcaacgacaaagactaataaggtcatcgccatccgccattcactgtgccaaagattttgcgtgtgccaccacacagctaacaatctccacatcagctagctagaccatattgcttaatcgtaactcacacgatgattcaaatttattgattgaaattctgaactgaccccgtaaacaatgttagctctacacataaccaaaacaatgccccagaaaccataaaatttctggggcatcatcaatccctacatgatactttaataaatcaattcatgcgtcttcaagcacgacggcgataaccgattcccaccgcggcaattaacaagcccaaaagcccggcaaaaatcacccaaatcggcgactgcttctcgctggtttgcggcaaagttccgtggttatagccagctgatgtgctttggtcactaccagttggcgttccaaagccgttcataccagttgtcacaccattacccacagtgccaccagcaccattgacacccgtgcttggttgcttgatcagtcctggtaatgccggttgacctaatccagattgtcccggtttaggtgcagcgggttggcttggaccgggtacagctggtcgttccggttgtggcgcggttggccccgtggttccagggttacctggctcagtcgttcctggttcgcctggtttgcctggttggcttggttcagtcgttcctggttcacccggtttacttggctcagtcgtccctggctcacctggtttacttggttcagttgttcctggttcacctggtttacttggttcagtcgtccctggttcacctggttggcttggttcagttgttcctggttcacctggttggcttggttcagttgttcctggttcacccggtttgcctggttcagttgttcctggttcagtgaccggttcatcagttgctgctaccgttaccactgccgtttgattcggcttgattgtaaatgataacggtgccgcattaagctgataaccactaggcgctttagtttcaacaaattgataattgcccgcggtcagacctgatacggtaagttgaccagtggtatccgtcgttaatcccatcttgagcactttgccagtggcatcttgcaattcataaacggccccagccaatgccgccttggtcgtggcatcagtcttggttaacgtgacatcaccagttgtcggcacaactggttgcttgacatcatcctgacttacctgaaaagcaacctctggcttaataccgccgagagtaaattttactggggtggtattaagttcatacccaagcggagccttggtttcaacgaactgataatcaccagcacgtagatttttgacaatcaattgtccctgcgaatcagtcgtcaacccagtttggattaccttgcccgtactatcttgcaattcataaacggctccagccaacacggacttggttgccgcatcatgcttcgttaattcgatggtataggtcatccctgctgttccattgccaccataggtaatatcggccgtcgcatcaacgcctagtccgtccagtgcagccgtattatgccatttagctgtgtcagccggattaaaattctcaaccttagtgttataagtaatcacaaacggcgaatgaatgttgttaaacgtaaaagtaatcacgttaccattagttgcaacagtcggtgttaacggttgctgtggcacttggataccattgataatttgcacggcctgtgccgcaaccgaatctggaatgaatgtctgattgggccctagcgtatctgtaaccacaaccgtcgagttattgcccggtgtcacggtaatgtgccaccccaataccgttggcgcaccatcacttcccgacgaaacaaccaagccacttttagcaatttcggctgatccttccgtcgccgtcgcattgcccttcgcattcatgctcaatgtgccagcccgactattgagtgtacccaacgcatccgtaaacgtgatcgtcccagtactggcacctttcgtatacgtaaacgtgcccaaggtttgcccggcagaatctgttaacggcatcacaacatcatgatcgatactgacgtacgttggaatctcaacggttgctgtatcgccggctttaatcacttcagaatctggaatactccaatgatacgttaattggtagccagccttatcattcaacgtacttgtgtcagtaacgggtttgccattcgcatcaagcacgatggcattgccagccgttaaacccgtaacactgatttctttagcatgtgcagtactccccagcataaatagcgctaatattaccgtcaacatgcttagcatatacccaactagctttcttcgcatacgctcctcccccattcaaaaaaagctttgtttttgtcattctcacaacccaacacaccctcacagtcgcgtatgattgtcagggtcggccaccagttagtgattcacgctaatcagctccacatgtacaatactgcaaccaactagtttactacgaatcaaaacttttatttgcgaactatccgaactaatcgtttagcaaaaaaggcccctagaactatgcctagaagtctaccggaaattccatttacattgtctcgctaaaaaataaccacaaagctaagccttaagctgaaggcccctttattctggaatatgactcgaatcaacaacctaaccaactgaaagttacgccaatatgcttacgacaatgtcaatatcatcgtctgatgtcgcaaacccgcctccataaacgggcgcccttgtggctgataccctaattgtgtataaaacccttgtgcagtgacttgagcgcctagtaccaactgtcgccaaccacggctcagcccatccgctgcaatccgttgaagcaattgtcgtgcatagccctgccctcgcgccgctttcaacgtagcaactcgttgaacatgccccgtccattggtcgctaggtgtcactcgcgctgtggctaccgcctgcttttgatcatcatacaagacgtagtgccacgtcgctggagtgaccgtatcaatttccaaagtttcatcgatatgttgttcctgcacaaagactgcccgccggattgcaattgcatccgcataaactgatgaatcaacctggttactcatttttatctgcatcacgttatcacccgttcttctgaaatactttgagaatacgcgtttcaccggttatcgtcaaactaactcgaaacgaaattaacgcattcttaaaattgttagcgattacgagttccgatgttatgttaaaatgatttgatgactggttatcgagtcatatccaaatttgttaaaaatgaggtctttatcgatgtttaccaaatttcgccaatacgttaacacgcgaattggatttttttggctactagtcttcttattctgggccaaaacgatctatgcgtacttaaccgaattttcactaggcgttgccgatccactccaggcattcctgatgctcgtgaacccgattgcaacgacggtctttctgtttagtctggcgttctacattcgtaaaaccggtgtatattactatattttgctattcattgatgcactcgacaccattttactgtatgccaacgttatctaccatcgtgaattcacggatttcatgactgttagtacgattaccggcgtgtccaaggtcagtcagggacttaccggctcatcgttagccctagcgagttggggcgatgttctttactgggcggatattattgtcattctggccttggtcattcttcatcggattgagcaagacacacgaccaattaagaaacacacggcctttgcgtacacctctgccgcgattgcaggtttcagtcttaacttgaccttagcagaatccaaccgaccacaactactaaccagaacgtttgaccgcacttatatcgtcaaatatcttggtatagatgcttttacagtctatgatggtatcaaggatgaacagaccaatcatcaacgcgccagcgcaaagaaatcagaattagataccgttaaagattatactgaatcacactatgccgcgccaaacgctaagatgtacggtctggcgaagggtcgcaacgtcattgtgattcatctagaaagttttcaacaatttcttattgatcagaaagtcaacggtaaggaagttacgccgttcttaaataaactgtatcatagcaactcaacttacagttttaagaactttttccaccaagttggtcaagggaaaacttctgatgccgaaaatatgcttgaaactagtacttacgggctctcaactggatcattgttctcccaattaggctcagataatacgttccaggccgctcccgcgattctaaaccaacgggccaattattcctccgccgtcttccacggtaacgtggccagtttctggaatcgaaataacacgtataagaatatggggtaccaatatttctttgatgccagttatttcgatacgactggtgataaatcaactggatatggtctaaaggataagctgttatttaagaattcagttcagtatcttgaacggctacaacaaccgttctacgtcaaatacatcacggtaacgaaccacttcccattcacacttgataaggaagacacgacgtttaagacaacggatactagtgattccgccattaacggttacttccagaccgcccactacctcgatcaatccgtcaaagaattctatacctacttgcaaaaggctggtttattaaagaattcgatgctcgtactctatggtgaccactacggcttatccaacagtgaaaactcgaccttggcacctattctcggtaaatctgcggacgattggacttcctttgatagcgcccagcttcaacgtgtgccattcatgatcaatattccaggaatcaagagtggtaaagtcgaatcgacttatggcggtgaaattgacgtcctaccaacgattctgcacttactagggatttcaagcaaacgttatattcagtttgggaccgacctcttctctaaacaacacgatagtaccgttgcgtttagaaatcgcgatttcgtcacgtctaaatacaccgtccttagcggcaaaatttatgacaacgcaactggcgaaacgattgatgatgatgaggcagttcagaagactgttgataaagatcagaagaaagtcgacaaagaattaagcctctctgattcacttaacaataaaaatttgttacgtttctacacccctaagggcttcaagaaagtcgacgcttctaattacaattacgccgatggccttgaaaaagaaattcagattcaaaataaattagctggcaagtcaaccagtctctactcgaagaatggtaataagtcaacggactcgttgtatacgaccgacgcaccggaagcttcgcataagaagactgattctactcgtatcaagattaccaaccctgatgatacggatagtaccacgactagctctagcagttccaaatagcaacaagcattccatttacaatgcaaggcgcgacggcaatttatttgccatcgcgcctttttatgatctcctttaaatatgacgctgccctcatccatctggcatcggttgcatgataaaatactaattgtggtttgtctcatgcttgcgcattacgatgattaacacgtgccatctcttaagttcagtgccgttcatcagccattcgcgcgggttaccgaaacgtgctcggtagccccattatgcttagttgaaagtggtttcctagagtgactaatctaagcaattatttagataaaaataactaacacaatgcgtgttacaataaaattaataatgacttgattcgtcaatgccggatcaagggaggaggcaccacgcatgggcgcttggcgtttttggtgggatagtacccgccgtttttataagaactggggcagttacgttgccctgatatttagtaccaatttggtcattagttacctagcaattcctttttttaattgggtgctagaaatgttactcaagtggcaacgggtcagttatgtctcgtacacgaatatcggtagtattattattcaccaaccactggccgcactcggtatggtggcgatcttattagccattattattttagtttattggcaatttgcctttctgctactgggtattatgaatatctttcgtggccgaccacaaactgtgcgcgcggtcttgcggtcaacggtcactagtctgactggcacctcacccagcactttcttattctttatcggctactttattgtgattttgccatttggaagtttcatctttacaacaccattactcaacaaggccaaaattccagccttcattgtcagctatctcatggaaaacccgtggatgacgctcggcttggggtgcttctacttactggctggttaccttggaattcgcctaattagcctattaccgctaatgattgtcgatcggcttccatggaaaacggccgttactcgtagttggcaacaaacgcgccaccatctttggcgctacttgtggaccatgattgtgaccttattcatgatttttctgatcgtcacgaccatttatacgttgatttacgtagcccagcttcaattcgataaaacaagttttgccatggccgctgccactgttaatctctttatcatggaagcaatcaccgaaattattatttgttataccacggccatcttcatgatgttaattattgtttgctatcgtcaagactttacactcctccgccaacaaccgcaatactttaacgaggcaccacggttgcgcaaattgacccgggcgagtgttgcaattggcttgctgttagcgacaagtttgctagttgccgttaatttagtctacttaaatggactagtgattaccaagccaatcatgatttcccaccgcggcgtcgataacggaaacggcgtgcaaaacacaattcctgcactgatcaagaccagcaaggaacatccggattacgttgagatggacatccaagtcaccaaggaccatcaattcgttgtcatgcatgatccaaccttaaaagccttagctggcgttaagaaaaagccatctcaattaacattaaaacaactagaaaaaattactgttcgtgaaaatggctatcaggcaaagattccaagtttcgatgcttacctgaaagcggctcacaagcatcatcaaaaactattagtcgaaatcaagaccagctcggcttacaccgccgccgatactaaacggttcatcgatcgttatggtgcgaccctactggctcatcatgaccaagtccatacgcttagtttcaaagtcatgcgtgacttgaaacgcttagatcaaaaacaattcgttagttacatcttgccttataatctcacgttcccgcatacagtcgcgaacggctacaccatggaggtcaccacattaaacgaccaattcgttgacaaggctgaccgcaatcacaagacggtttacgcctgggacattgataatacggaccaaatggatcaaatgatgttcatgggcgtcaccggcgtagtcactgataatctaacggaaatgcagcaagaagttaagagcaacaccgaccatcccagctatgccaaactcttattgacttttatgaatgaattaagtctaactagcaacgagtaatccacattatttcaaagttgctgtcacagcgagtgcataaatcattcagcaaccacgaaaattctgaatgatgtcgttgctgaaaaagtgacttccagctgatgacgaatcgtaagcgccatctgaatgcataagtgcatttggatagcgctttttttgatctgattagccgtcgcggtgattgagatgttggtaaaaaactgtattaaagtgctcagcgctccgggttatctgccattttaatttctaaagcgcacgaatgccgatagttgatcagccactgatttttaatacttttaccgccaattaggtgctcatatggaatgacccagaaacagggtctgaaccatgaagtcctttgatgacagtacgttatcagggacgtcaatattagataaaaaccagaaagagccatgagttatcatgactccgtaagcaacagattggtagcagttcgtcctacttttgcttgtgtctcaacacaacaaccgaaatacctaaaattccaagaactattggaacatcgattgcggtaaccggcaatccaaattgcgataaaatgtaaatgaagcatactattaataaaacaccaccgtatttttaaaaaaaaccgataattacattgtctggataacgcttttttaaatacagtaatagaaaaataaaacacaaataaagtatcgtatgcttcacaacacttagtgacatataaaatctaatcatctaaactaacacaccatcaataatggaaccttttgccataaacagaatcatcctctcaaattctacgttaacaacaggcagtatgttacgaatttatcttaacaacagcgtttctttatcgttatcaattttcagtaaattttgtgtatttttttgtacaaacttatacattgtaaaagtttagtcggagcgaccggttgtttttttattttaagacacaccaaagctatctagattgaaaaaaacatttgcctttctaccacttcatggtacaacaggccgccaataaagcgggttcttaaaggaacaagcaaataggacgagaagccaagattcggtttctcgtcccatttgcttgtatagcgccagttatatcgcagctcttttaaacttacattttttcaaacacggtcgtactatgcagtggactccgtcgttcgggatacaaggtcatcattaactgattgaccgcgttaggagcttccccgaagccactggcaatcaagcctaacttgcccgcgtaagtcaccgtatcaccaatagccgcaatcccaggtacgtcggtattcatctccgtatcaacggtgatgagtcggtgggccatggttggggtcacgtgccagtttcggatgactttattatccgcgataaagccatagttaacaatcaaatcatcaacggccaatgtttcttcagttgtgccgcgaacctctttcatcgtcagctgtaactgtccggtagccgtctctgcaagttgcttaatcaaaaatggcgtcttgatttcaacggaagacgcttttaacaagtccacattgtgttccatcccacggaaccgatcacgccgatgcatgatataaacgtgcttagcaacgggttcaagcatcaaggccatatcgatggctgagtcgccaccacccgcaactagtaccgttcgatccgcaaattgcttgacacttggaatgtggtagaataattgcttattctcaaattcagccgcattatcgactgctaagcgccggggttcaaaagccccactcccagtcgctacgataatcgctttggaatgtgactgctgtccactcgccgtggtaatcgtgaaatcacccatcgctcccgtgacatccgtcaccgggctcgccaattgaatgtcaattggaaattgtgtgagttgcttttcaagttgtgccaccagttcgcggcccttgattgccggatatcccgcaacgtcatgaatgatcttctcaggatacaaagcctgaacctgaccccctaattcggggagactttctaataactgaacccgtgcattacgcataccagcatagaaggctgcaaacatgccgaccgggccaccaccaataattgttaaatcatattctgcactcatcgtttcccagctctcttctatgtagacttattgcttctcattctagtggattcggcgaaggtttgcaaaagcaatttttactaattcgactataataggattcaaaggcgaggtggatcagtgatgcgacgaattaaaattattaaaatcatggccattattagtgcgaccctggtcgtagggattggatcctattggcaacatcgcttgaccccattacgaaaaacgcgggtcgcccaaacgagtattccgaccatcttcgtcggtggcgattacgcgcgcgcattttctaccgacggctttgtgcaccgcttaaccgcggcacacctgatgacgaaaggattggtcgtccatgttagtcacgccggccacgtgaccgtccaacagttcggaccactaaaaaacaacccaacgattcaggttatctttgccgataatcatcatgcgaaacgtcaagctcggcagtttgctactgtcatgcaagggctcgcaaaacgctaccacgtgacccgctacaatgctgtcggtcactcatctggaggtaatatcatctttgattatctgacagcgcaagtcccccagcgcgcacaaatcaataagtttgtgaccattggctcgacctatccgggcttgaccactcagcagttaaaccggttaccacggtccttgccgatattgaatattgccggccatgtttggcatacaagtggtgatggcggcgtcaatttacaagccgtacttaaattcagccatcaattattggcagctggttggtcaccaaaaacccaaatcattcacggtagtcccctgaccgccagccactcaatgttgcatatcaatccacaggtcgacttactcatcatccagttcttgtacggcaactgatcaattcatcgaggcgtgctgccaatcaacctgaagcacgccacacttctaatttaacaggattcggacacccttacgtcccttggatgggatggcaaatggtgtcttttctggtatcctaaaacatcacatatcagttaataacgcaatcacaaaaaagtctgctaaatctggccgcataccgttagttaagctagcaaacggtgttttgtcagcgatttttatgtacaacggtggtaatgtatgggtatatcttaatggaggcgattaccatgcgcaaaaaatggcgatggttattattagcacttactggaattttctttttgatgttcgggccacccttagttagtcaggcccgcaacgtaattgaagcaacgggcaacgatgttaatagtgcggttatcaaagatagtaagggcaagataatggctcacgatgcacaattgccagaagaccaagaatacacagtcaattacaactggcgcatccctgataacctcaagatcaaggcgggcgacacgatggctttccaagtccccgaaaacgttcgtattccgcatgacgaggcttttccaatgaaaggaaccactgcaggtaccatcggaaccttcttcattgctgccggcgcacatacgggtctcgtcacatttaatcaggcctatcaaaccagaccacgtaatcggaaagggtttgttcaattggacgccttcggaaccgttcctagtcatcctggtaacttagccccaattttattagagaaatcagctgaatgggctgacgaagctaatccacggcggatcaactggacaattcatgtcttgcctaataacaatcagctcgtcgatcccacctttgttgatacgttgagtccgaaccaaacgtatgtcaatggcagcgccgtcctacgcgatgagacaggtaatattattcccgtcaatacgagcgtgaatggtaatcaattgacgtttaatgccacagggtcgtttacgtcagagttagctttgacctaccaaactaagactaacgaacccactggcgacgcaacttttgaaaataatgtcacctatactgacaagaacggcaacaagggatccgcgacagccacgatttcacggccagtcaccgaaccggacgttcccgaaaatccaggtatttcggaaccaacagatcccgatgaagatgaggaaccaggagttactgaaccggaaaaacctgggactaccgaacccgagaaacccggagtcaccgaaccagagaaacctgggactaccgaacccgagaaacccggagtcaccgaaccagagaaacctgggactaccgaacccgagaaacccggagtcaccgaaccagagaaacctgggactaccgaacccgagaaacccggagtcaccgaaccagaaaaacctgggactactgaaccggagaaacccggggtcactgaaccagaaaaacctgggactactgaaccggagaaacccggggtcactgaaccagaaaaacctgggactactgaaccggagaaacccggggtcactgaaccagaaaaacctgggactactgaaccggagaaacccggaatcactgaaccagaaaagccgggtaccgtctcaccagaacagccgagtggtcctaagcccaccaatccaggaaccgtaacacctgaaaaaccaacggccgtcactccagccgttccaaatgagtcgtctccatcgacccccgaaccaagcgtcagtggtaatctgtcagcacctgccaatccagcgacaaattcgactaacacgaccgccacaacggttccggcaactaatcccttaccagcatcggcagctacagcttttgcaggctcagcaccgatgaataagtcgttgccacaaactaacgaacactcggcaagttggtcagtagctatcggtctcgccttattgattggattactcggtagcgcttttgtcctgacacgccgaactaagcatcggcattcataattagcttgtcacaccgtcaaaaaaatgagctgctcacgtcgcgttgaactgacgatcaacggtgtgagtagctcattttttataatttcaacttgctgctagtaacactgcgcgatactttgttagtcggtctcacgatctagttgctccagcgccgtttttaattgtgcttgcgcactcgcatccagtgagggatacgctaatggcaattccgacaggcgttgattgatgatttccgaaacacagagccgcgaataccacttactatccgacggaatgacgtaccacggtgtcgctttagtagccgtcttggtgatagcatcatcataagcacgctgataatcatcccaatactgccgttcctgaatatcggcagctgagaatttccagttgtgacttggaatttcaatacggcgaataaaacgttgcttctgttccgcctttgacatgtgtaagaagaacttgagcactaagtagccgttgtgttgcaagtaatcttcaaagtaccgaagatcgttaaaacgacgttcaaaaaaagcatcatccacttgtttcttatcgttaatctcaccgacgtgctcattcacaataatttccggatggactcgactaacaagtacgtcttcataatacgaccgattgaagatcccaatcatgccgcgtttggggacccgatcatgaattcgccataaataatcatgcgcaatttctttagtagttggttgcttgaacgatgtgacttcacagccttgggggttgaccccactcatgatatggcgaatcatactgtccttacccgccgcatccatcgcctgaaaaatgactaaaacaccaaatcggtcttgtgcatataacttaccttgcagttcagtcagttgcttaatattcttggcgatttgcgccttgatgaccttttcgtcttcaaattctggatcaaccgccgttgctaatttagttaatcctaatttttgctttccagtatatcggtagtgcttttcaaaattcacgttctagcttcccctcaatattatcgataatcaactaatgtcgctagcggttgatgatctgctggcttgccagcaacggccgctttgccaattgaaacgagcaatagtggccgataccgctgggcgtcaagttccaaaatagacgtgaatccggcagcatcaaacccggtcatcggattcgtatcaaagccatgatctttagccactaacataaattgcatcgcaatcaggccagcatctagggcgccaatggtctcgtcaccagtatcaaattgttgcccctgactggcctgaaaagctggcgcttgatgttgattttcacgatccagcacaaataagacgacggcactggccgtagttaactgactggtattaccagtcgcggcacacaaccattgtcgcaaggctgcatcctcaatcaccaacgcccgaatcggttgttgattcaatgcggttggtgccaaaaatgcggtctgtaacatcgcgcccatttcttcacgcccaattttagtttggccgtcatattgccgaaccgaatggcgcgcattcatgattgcttctaatggactattcgtcgtcatcagcttcaccttccttaattgtcagtataaaacagccttcaacatttcgccagtaagcgtggtcgtgaaatatttccgaacatttttctgttcaatgttaatttaattcgccgctagccgttgtcagcatcagctgaaacgtttacaattaaaacatagctttatagcgcttcagacctaatcagggaggatgttttacatggcaaaacgtaaaatgattttagacttagacaccgggattgacgacgcaatggccattgcctacgcagtcggtgcacccgacgttgatttaattgggattatcagttcttatgggaactgcctagtggatcaggcggcgattaacagtttacaaattctagaactactaggtgccactgacgtacccgtctttctaggtgaaccccactccagtacgacggaacactttgacgttatgccgatttcacagcagattcatggcatgaacggtatcggcgacgtgaaccttcctgaaccgaaacgcgccgtggaaaagcagtccggtgtcgacttcttaattgatgccgttcaccaatatggcgccgatctgaccctagtgccaaccggtcccttaaccaacttggccgaagcactcgaaaaagcaccagacattgccagcaccattggtaatgtgaccttaatgggtggtgcactgactgttccaggtaatgtcagtcactacgctgaagccaatattaatcaagatgccgaagcggccaacgccgtcttcaccagtacgatgcctcttacgatggtcggactcgacgtaacgttacggacattattaaccaagactgaaacacaacaatggcgggacttaaagacaactgcgggcgaaaaatttgctgacattgttgactattacattgcggcttacgatattacgagtcctgacttacacggttgtgccttacacgatccactggcagtcggcgtttcactcgatccaagttttgtcaccacgttagacctgaatatgtacgtccaggctagtggtgaagattatggccggacaattggtgaccctgcgcgactcaatgacccaactaacgtcacggttgcgttaacggtcgacaaggatcgttatttgaagacattcatgaattacctgacgacattatttaaagcccattagttatatttcatcatggcaaccggatcacagaagttcgcttccgtgatccggttgttattatttatttacaagtctgctaatttttcatttttccccggcaatttatgttaaattagcagtatcaccattcagaaagtaggtatcgccatggcacaaaaatattacgctgttcgtaagggacgccaacctggtatttaccgcacctggcccgaaactcaaaagcaagttagcggttatccacaagcacagtacaagagcttcacaagcgagaaagacgctcaggattttatggctggtaaggccagtccaacccgactagctcactcaaaatcaatatctaatcaaacgccggtcaacgcagccattactgtttatactgatggcggttcgcgaaataccggaaacgttgccggtcagcacgtgcaccaagatgataaggctgcctgggcttatcggattgaaatgcccgaccaactcgtcactgactctgccggcgaatggggtgccaccaataatcgcatggaaatcatggccttcttacgagctcttgaacaattgcaacagcttggccaaactaagactgggattctgttcgtacttgattcacagtatgtcctcaacgcagtcactaagggctggctggctggttggaaacgacgcggctggaaacgcagcaatggtccgttagttaacgctgagttatggcgtgaagtcgaccggttgcttccagcattcactgcacttaattaccgctggactaagggccacgctaccaatcagggcaatgtctttgtcgatcatttgttgaatcaaactatggatcaaatgcacgctggtcagccggcccaagcctcgactggtgctaaaattagtccacagccagctaaaactagtgtgccacagccgactatgtcgaacccaacaccaactaagtctaatcaatcggccactgtacgctcgacaccagctgaaaaaaagccagttgatcccgaacaagtcgcccgttcagtagcggcaatcaagaagatgctacgcgataactaatcaaaaactgtgaccccaacatactgattgctggaaccgaattccgcaagtcaactgtttggatcacagttttatttcattaaaatttatagccaaccaattttttttagtccattggcgatgccatcgtgatcacaatcggtcgtcgtaatgtctgctaatgctttaatctcagctttcgcgttacccatagcgaccccaataccggcgctctgaatcatctctcggtcattatcattatcaccaaaggccgcaacgttactcgaatcgacattaagtgccgctgccagttttgcaattccttgcgccttagatcccactttgggaatgatatcaaccccgcgttcatgaaaacgaacaaaggaaaactcatctggatgcggcaacaatcgattttggacatccgggtaaaacatcatggcctgatacacatcatggtgctgatagtaatcaggggcataatccaactcaggtgcccgaaacgtgttcaacacctggcgcgtcgtggtggacggatgtgtgtggatatgtagcccatccagtgattcgaccacaatatcaatattctgtttatccgccgccgcaaccaatttgccaacattgtctttagataaggtgtgttgatgaatttgttggcgaccagcaaacgctgctgaaccattgcacagtacataatcttgtaattgtaaggcattaataactggccgggccatcgctaaattgcgacccgtggcgatggctacatgaatcccatcatctctaagtgcttgaatactttcaatggtgctcggtaataattgcttattgcgagccaatagtgtgtcatcaatgtcaaaaactgctaatcttgctaccatattaattgctcctccaagttatcgcgggataaattctgatttaatcaattcatgggtacggctcttgccgattgccaatcgaaatgctgactgacccaatgattctagatgatggtcgatcgtcgaaaactttaatagtcgactcgtcagcaagttctcctgcccaatcactggaatgggggctaacccgtgatccataaaatattgataggcgcccgccccaatatcatcgccatttgcaaaaatcgcggccacgcgagacgcttgattggcaaaatacttaccagcgtggtaaccgtcttcataagtggcagcaccggtatagagtcgctcgtcatccaactgaccatatacttcgtggtaggctcgccgcgtaacccgtgtactagcactaatgacgttattacggctcaaaataacgcccatcgtcgcataaccttgttgcttcgcccaccgtaatgccgtaacatatgaagccatgcggtccgtataagctgcggccaatgcccggtcatcacctggatcttcacaacagacgatttgaccatacttgcggtaacgttccagtgtatccagtgaactactacgtgacgtaaaaatcagcgcatcataggctttacttcttaagtcttctaaataatggcgttcaatcgtcatatcataattagtcggtagcaacatgattttataacccgccgcaaagcctgcactgacgataccatcaactacccgtgcgaaatacgggtgattcgcatacggtagtaccacgccaattgtcttcgtccgcccccgacttaaatcacgagcgacccggttaggtacgtaatccagttcttgcataatagcctcaactttggcccgtttatcatccgcaacgtacttctgatggttaattacccgcgagactgtcgagacggaataacccgatagtcgcgcaatatcatgtatattcgtcatcacagaacttcctctctcaattgatgataccacgttgtttcatataattaccataatttatgaaaccggtaccaggtcaagctgattttactcagttttatgataatcgtcgcttttttccaatattaaccgtatgatactaactatggaggtcgatgacatgtcaatattaattgccttgcaacaacagtcagactttactagtactgaacagcggatcagtagctatattctggcacatctagatcaaatgccaactattctgatcaaagacctagccgctaagacgtacacatcccattcagcaatcattaggttggcccaaaaattgaactaccggggctttcgcgatttccaacggaaattgactgccgaaagcattgcccaggcacatcaagccgccactgtggatgccaattttccgttctcggcgacagattcggtcgccacaatcagccaaaagatggccgccttgaatattcgggccattcagacagcccagcagcaacttgatacgaaccaattagcccaagctgctgacttattgacgcgatcaaaacgaatctttatcttctcgcaaggtgactcacaactacgggcccgtagttttcaaaataaactcgtcaaaatcaatcgttttgctataatcgccgaagaatatgctgacgaatcctggaacgcagccaacttaacagctgatgattgtgctctgattatttcatatgctggtactactaaaatccatcagcaagttgccacctattttcacgctcatcaaattcccatgattgtcctaacaggtaatccacaatcaccactcatcagtcaagcgacccagcacttgctcaccgttcagagtgaatataattttgccaaaatcggtacttttgcatcccaagcggcgtttgaatacgtcttagacagtcttttcgcagtcatgtatgcacatgattttcatcaccatttacaagacctgcgacaaaaacagcacctaatccaggacggcccgctcaccacaaaataacacatctaacgactcaaaagcgcgtcctacagtttctaggacacgctttttacaatatcttctatttattgtgcagccacgttagcaacgacgcattagcccaattgcaatcccgcgctcgctaacgcttggtcaacaacttccatgaccgcttgggaatgatctaattgccgcttaacggttaccatatcgtgattagcaataagacgttcaaacgccacaaactcagcatacatccgatgctcagcttgattaagcgctaaatcagttgtcgttacatcatgtgcaatttcagtgatactttcgaccgtattagtaggaccgttgacaatgatcgaaccagtcgtcccctgaatcgtggaacgtaccggtgaagtcgaatccttggcaccgatacaaacgactttaacattcggataggtcaacactaagatgcctgatgtatcaatatttcgttcaacattagctaaatactgcacgtgcgttggtgcgcctaacaagccaaccacaaaatgaatattataaatattcaagtccatcagggcgcccccaccaagcttaggattaaaagctggtaagatcgttccggctttaaactgatcataacgtgatgaatactgcgaatagttgcattcgataattttcaagtcgcccaacttggtcaaatcacgtttgattgcctgatagttttccaaatactgattcgtaattgcttcgattaacactaagtcttggcgacctgccaattcgattagttccgttaactgggatgccactaacgtaaacggcttctcacaaatgacgttcttccccgcttgcaatgcccgcttcgcatagccataatgtaacgaattcggcaaagcgacgtacactgtatcaattgtcgtatcggctagcaaagctgcataatctgtgtagaccgttccaatacgatacgtggcttgcagctcgcgtgctcgcgccacactccgcggcgttgacagcaatcccaccaattcaatcgcgggaatgctcttcaccattggcaagaagtcctgaacaatcttgcctgttcctaaaattcctaatcgcatcataatcctcctcataatttatattaacgaattaataccggccaaatgcaaccagctaaggcccactgaaaaaagctcaagtttacgtaaacatgcttagccagcgtcggcttgcgccgaccgccaacaattggcaccaacctcctaggacgcgcaccggtagccgaacaacaatctaaagctgacacgtaccaatagctgggctagtgcaacacgcaagaagcgctaatgtcggcattgttgaataccagtttctaacattttcacttgcaacaacgtttcctcatctttgactaacttgggttgtccattgatgatgctgtcgtaaacgccggcgtaaacccgactgtagtcaccaacttccgaaacgactgcctcttcgtgatactgacccgcatcgtcgatataagttaacgtgccatagttttcaggttgatcaatgccaaagtcagcgtgattcggcatgtaaaaatgtttcagatcgtattcctgacgatccttagtcgcctttacgaacatgccctttttgccataaaccacgaagctcggccgtgatttaatgcggaaatagctagattttacagagactttcaaggcaccgtaatacagatcgatatcaaaataatcattcatccggtcacttcccaatagttgccgaacatcatagtgcacgtcatccggctccccgaagtatgcaatcacttggtctaaagtatggcaagcatgaccatataaataactcgtatctaatgaaaaatggtcaacattggttggaacctctggccggaaataatcaaagtgcatttcgacttccagcaagtcaccgaggacgccgctttcaatgaccttttgtgtcgtcaaatagtccgaatcaaagcgccgattctggtaacactgaataaacaaatgcttttgcttagccaattcaaaaagttcgcgggcttccgctgatgtttccgtaaatggtttttccaccaagacattcttaccatggttcaagacatccttagctaccgaatagtgcgtatgactaggtgttgaaacaactacgagctgaatatcagggtcctcataaatatctgctaacgtagtcgtgtaatgcacgcccgcaattggttgccaattctggtgtcctgaacgtgaatagatggtcttcaccttaatttgatctttgagtttcagtgcaaatggtaagtgatagcggttagcactcttaccgttgccgatataagcaattgttaacatcgcgatgtcctccagttaagttgataatttcattatactgacttagaacgtcacgccaagctaatgacatactttaggtcaaaacgttcaataattaacttctaatcggtctttttttaaacattaggtccagccccaaattaatcattgcagataatacttttattcatatgattgcgttaaaattaaactactttacaaaatctaggaggaaatttggtttgcaaaccgttttcttagtcttattactcgttgcggctgtcgtcgttgctaacgccgtctacgcacgtttcaatcaaattccagtcgcctttttacaaattggggctgggttaatcttgtctctgattccgttatatcgaaattttgaattggaacctgaaatttttctattcgtcattatttcgattttaatgtttaatgatggccaaaacaccaatattcgcaagctcagtcaccagtttggcacgaccctttcgctttcggtagtgttagccatcgtgaccatcctaattgttggtacggtcactcacttactgattcccgagttttcgctggcacttgcttttgcccttggcgctattattacgccaaccgatgccgtcgcggtctcatcgattacgactaaagttgcgattccaggtgaggtcatgacgacccttgaaaatgaatcactgttcaatgacgcttccggaatcgtggcctttaacttagcgattgctgcgatcgtcactggtaagttttcggtctggcacggagtcactaactttttatatgtttttgccggtggaatcttcgtcggcctaatcatcggttatatcattgttgctgtcaggatcatgctgattcgcatgcgggtcgatacaccttctgtgatcgtcccctacacattactgacaccgtttgtcgtctatttcttagctgaatcattaggcgtttccggtatcttggctgttgttgccaccggtctcattcatggtgtccagtccgatcaattacggttgaccacttcccggctacaaatcgtgatgacaacgacttggtcaatcgtggctagtattttgaacggtattgtctttgtgttattaggtgtgtcgttgccaagtgtcatcaaccacttacagcaacgtgatactagttcagtcgcggtattagtcggtctgggaatcttgctctacctaatcatgacgttcgcccgttttctctggacgcgcttcgacttagcccgtattcgcgcgtgggataatcatgaaaagacccgtaatgcattcgtgatgggtctgagcggcgttcacggcacgattacgctggcgatggccttttcattaccactaacactcaatggcagtgcttttccttatcgcaacgatattattttcgttgccgcagtggtcattctaactagtctgctggtgccaacacttttgttaccgttgacgttgccaaaacaagttgttaaggtcactgaagatgaattggcaaccgccaaagctgacatggtaactcacgctattgatctcatgcaagcacgccatggtaataatgctggcactagtaaagtgattgcgattctgtccggccaacgagtactagatggtcgtcctaagcgctcgcaactggcgagcttgttcgacgccactttcaaagtggaacaaaccactattgatgaaatggttgccaacaatgaaatcacgccccaggccgctgaaaagtacatgcgcgtcgctagccagacgcgtctgcagaatcaacaaactttcttcgaacgcttgaaattatttttccggtttacactcagcaaatggtcgctcagcaaaaaagctcgtgcccgacgtaaaatgttccgacaataccggccccatggtggtcagagtcgagctgagctcatgactcgtaatcggcaaatgtggcaacaaatgcgacagatcgaacaaaagccgtatgaggccgtgttagcctatttagccgatacgattactgctgacaatcagcaagctatcgggatcgttcgccgcgcctatgatgaacgtcatcgccgcctatctggtgaacgggatttccaggaaactcaaaatgagcttctaattgaagcattccagttggaatataacttcattcagacccaattagccaataaaacattcagctcagaacttggtaaccaactctatgaacaaatttcaactgatcagttagtttacttgcaatcgatcaataccgactaaattcgtttagtaatgtcaataacgtgaccaactgtccacaccactatttgggcatcgggtccgttacactaacgttgtaccattggtcgaactgccaactgaacgtctcaacaagccccccaatcttgtgaccatggtaacctaatgacgcctgacaacttgtcggcgtcattttttatgatatttttgaaacaaaacacttgtcttagagtggctctaaggtgctaatctataaaagtattcatgaatgagaaagtgagcgatagataatggaaacaccgattttagcacgcattgatcagccggccgatctgaaacaattatccttgccggaattaacacaactcgcaagcgagttacgtcacgtcctactcaataaagttagtcaaactggtggtcacgttggccctaacttgggcgtagtcgaattaaccattgcctttcacaccatttttaattcaccagttgataaggttgtatgggatgtttcacaccaatcctacacacacaagattctaacgggccgaaagcaagcttggcttgaccccgctcattataatgatgtcagcggctacactgccccagaagaaagcccccacgactatttcaatattggtcatacttcaacctcgattgccttggcaactggcatggctgttgctcgtgaccttgagggcaaaacaggcaatgtcatggcagtgattggtgacggctcattatccggtggtttagcattggaaggtctaaacatcgcggccaccttaaagtctaacctcattattctggttaacgataatggcatggcaattgcagaagaccatggtggcatttaccaaaatctccgtgaactccgcgaaactaacggcacaagttcccataacttgttcaaagattttggcctcgattatcgctacgttgatgatggtaacgaccttgagaccatgctaacgacttttaaggaaattaaggatgttgaccacccaatcgtgttgcacgtccataccgaaaagggtcacggctatcaacccgcgatcactaataaagaagctttccactggcacgtgccgtttgacctagtgaccggtcagacgttgcatcccaacaccaaggaaacgtatacggatgtcattcatgccacgttagccgatgagttagcagccaagacgcctatcacggcaattacggcggctgttccaggaacttatgacctcaaacgctttgctcgccaatatccagaccggtactttgacgtcggcattgccgaacaagaatcgattacatttgctgccggacaggcccaacaaggcttacggccaatcgtcttccattctggtaccttcttgcaacgggcctatgatcaactatctcatgatcttggcatcaataaattgcccgttacgatcatggttgccggtggccgcattaacgcaggcgatccaactcatcaaggtacctttgacgttgccatgctcagtaatattcctaacttaacttacttagcgccaacgaccaaggaagaacttcaagccatgatgcactgggctctccatcaaaataacggtccggttgccatccgggtaccaagtaatgacgtccagtcagtacctctagcgcctgattttgacgcaactaagatgcacacattacacgctggtcagcaagttgctttactcggtgtaggcagtctcctgcctttagcaacagccgtgcaacaacaattagctgagcaacacattgacgcgacgctcattgatcccctggacatttctgaccccgatacgacgactttggccaacttaaaggccgaccatcagttagttgtcacggttgaggaagccagtctcagcggtggttttggtgaaaaagttagtcgctactatggcaacagcgctatgcgcgttctgaactttggtgctgccaaacgctttaatgaccgtgaaacaactaatgaactgcggcatgaatttaagctgacccctgaccaaattgtcacggcaattactgatcaactagcagaataatcatcaggccagcgactcaactttcgtttacccaccaaaagtctagccagtatgttgtcgaactcaacacgctggctagactttttatatttaactgacaataacccaatctcagtttaacgattgggaaaacaggacggcggctactgtgccaatttggggcaaaaatcagcaattagcaaacagaacgccggctaataagtcgccattcgcaattatttatattaacgcccgatacctggcgccttggtcggccacaaaatattattaatattttattgttcagaaaagactttcagcaagctgctgtccttatagctccaaatctcattaatataattatttagtcaatccaacgctagttaaacaattgacagtcccatcagagttgtttacagtaaaaccaatctcaaacctaatattggaggcctttattatggcaagtcaccaagccttactgattattgattatacgaatgattttgtggctgacggcggggcactcacttgtgggcaacccggccaagcgctcgcaccaacgatcgtcaaactcgccaaccaaatggctacggcaagcgactgggtcttactgccaaccgatgtccataccccgcatgatccttaccatcccgaaagcaagttgtttccacctcataatgttcggggtacctggggtcgtgaactctatgggccactcaaagattggtacgctgatcatcaagccgccgataatgtttgggcattcgacaagacgcgttacagttcatttgcgggtactgacttggatttacgtctgcgagaacgccatgttgacaccctgcacttagtcggtgtttgtaccgacatttgtgtccttcacacggctgttgacgcctataatttgggttaccaactcgtcattcatcaggatgccgttgctagttttgacgccgctggtcacgaatgggcgttgcgtcacttcaaaaacagcttaggtgcaaccatcgtttaaaaaatgcgcaataaaaatcactcattcaatacgaatgagtgattttttaggattactaaattaattcaaggttggctcaacccatttttgcaacatcaaggtatttaacacaccttcaactaagataactgccaacatgacgagactaccgacccataaagaatcgatttgtccctggttgactagctgactggagagaaagctgaccatgctaatcaacaaattagctaagcggaaagctacgtaaatgaccaccaccgtgataatcacattgacgaaccgttgccgaaatcgtggtaaaaagcccttggtcgcattcgtaacaaaatggcaaagcgttatcgtgctccaaatcagaatcgtcacaagaactaagactagcaacgttccgagtgcgaactgcacggcactacccgcatcaaactggctaaagaacagcgacgctgatgttaagcctcccatcagttcattccaaccaatccacagagttaagcagaataaaatcacttggaccaaccaaacataaacaatatcaaccaacgaaacgactaaattaatcgtatagcgtcgccaatcgctaattggcaataaccagaacgtccccgcccggaagaatttttcatttgaaactgccaataagataaacccaacgattaaaggtaacgccatccaagcacataaattatagaataatgtggcagctgtgaagtttcctttgatggcagtccacaaactagtgacaatcaccgccaaagcttcgataccaatcaataaactcatttgcttaaagcgtggccaactgagggccttaaatagtgaccaactacttgtcatccgtcacacctcccatatataagctctcataataatcttcaagttccatgccatgttcgtcgcgaatctcatctgcaccctgatgaacaacaattgtttggtccttaacgaccacgatttcatcaagaatcggcgcgatttcagtgacataatgatcactaatcaataatgtcgcttcggcaggcgtccacttgataatactgttaataatttttttgcggctcatactgtcgatcccactaaacggttcatctaataagtacaaagccactttgcgactcagggtcagcgcaatgattaatttctcgcgggtccccttagacaactcacccaatttttgttgttggttgagttccagaaagtcaactagctcttgatagcgtttggcgtcaaaatcaggataaacaagttgataaaattgcgcgatttgttgtaatttcataccggcactaaaaccagtcaaatgatccgtgaaacttacctgctgcttacgggctacggcagttgtcgcgccattgatcacaatactgccctgacccttggcactacccgtaattagtcgcatcaaggtcgttttacccgccccgttttcacctaataaaccgacaatcttgctgggcgccagggttaattgaacattttgtaaaatcattcgttgattatgtttataacgtaaatccttaatcgtcaatgctgtcatgattgtgctcctctcgttgggcaatgtattgttgcagactcgccacgatttcggcgtcacttaaatttagtgcgtgcaattggtcgtacgctaatgctaattgctcgttcaccagtgtagtcctcaattgcataatatgcgcctgatcttccgttacgaaattccccttacctcgttgggacgtcagagtgccttccgtaatcatctcactgagtgcccgctgaactgtattaacattaaccgtcaagtccaacgcaagctgccggactgcgggcaactttgcccctggtggtaacgttccgtcaatcattttatgataaatatactgtttgatttgataataaatcggaaccttgtcatcaaatttcaatttaacggcctccttagtgttctatttttctattacaatataacacagctgataccaaaagtacaataatgacctaccgttacttgtgatagcggttacatttgtaacttgaatctcaatttaggagcgctatacttaaattaggacgtgggctaagttcgccacatcacaggagagggatggtagcatgttaaaaaacgaaaacgccattgcgctaattcgcgccatcgatgtcgcttatagtgaccccgaagtacgcgcaattcccgaattacaacaagccttagctaaggccgcacaagacttagactgtgttgcggaccaccatcaagtcgctagccgcctaaaccagttgctaactacttggggggctcgtcattcacaaggccccgccgtgcttgaccagttatacctgatcacactcaaagatggcgtcgatgtaccttgccaggtcccataccgggcataattatcttaatatcacaaaagctcccagatcgaatcgatttgggagcttttgtgatattaggatgctaactttcaaggacaaaagcagccagctatggaccactggaaaaagtgcgagttagcgtaaccttgcttagttagttcgtcctacgccgacttccaggcatttctgctaattgccggaacgtggcgggttgggcacgggctcaaatcgacgtcggcttacgttccagcaattgtcacccagccccagaggtcggaatcggacgattattgctgacgaacaggaatcaaacaaacggcctcttaatatcacgattcatgacaaatcagtgctaattcaagcaagctaacattactgcacgtattgttccaagaatgcagcgacgtgacgcttgtaacgttggtaattctgagtaatggccgtggtgtggccggctcccttcaccaaccataaagacttgggttggtgagcattgcggtacagcgtcttgcccatgctagtcgggacaaaatcatcccgggtgccgctgataatcatgataggcaagtggtttttacgaatctgagcgattgcatccgcctctttgaagctataaccagcacgtaatttagtaatgagactggttacgttgactaacggaaacgcgggtaaatgatagagttgccccgcttgataactaataatcgcatcagcactcgtaaacggactatcgacgacgtacgctttgatctgtggcaactgccgttcaccactggccatcgtcatcccggctgcacccatactgataccgctcatcacgatttgagttgtggccgttttatgtacgacggttttggcccactgcaagtcgtcgcggcgctccagccagccgtagccgaccgcttttccctggctcgcaccacttgctcgggaatcaggaaccagcacgttgtagccgagttcatgatacatccccgcccacgcacccatcaaacccttattcccagcaaatccgtgtgccaaaacaacagtcctcttagaatttttaactggaatataccaagcaaccaaccgtaaatgatccgatgactcaatagtccaagtttgcttacgcgcatgtaaataccaatacttttggtgataaaccgaactttttttcgatagctttgtactctgcgtaacaaatgacttatcaccacgggcaattgccacgtggtaaaaataactgccagcaccaatcacagctcccgctaccagaacaacgagtacccccagtgtgatccaccatttcttcattaaaattcactccttgatgagacaaaaatctgttttgagcgggaaaatttcgccactacttcataataaccgttataattaaagataactagaccagattgaggaggcttctttttatgcactattccaaaacgtgggatttggacagtatctttgctggtggcattgattccccagcactaactgcaaaaatgtccacgattaaacagcagttgaccacgacagcagacaccttagttcactggcgtgctgccgctgacacaccagacgccgactggtttacccaactcgtcaacagtctgcaagccattcaagccggtattgaccaagctaccgttttcgtggttgcttatcaatccgcacatgcggacgacaccaaagccgccccactactgaaccaaatttatcaacttgataatcagttaaacaatttattaacccgcttcaagaagcagctcgttaagttagatcaagccacctttgacacgctcgtgcaacaaccggcactacaagccatcgcctttaacttaaccgaaatgcgtcagcaaggcttagcgctcctagatgacgacactgaagccctaatcaatgacttagcactcgacggttttcagggttggagtgaccactacgacacgttagttagccaaattcaagtgccctataccgatgaaaacggaataacccagcaactatccgcgggtcaagctcaaaacatgttagcagccgccatgccgaacgcccaacgcgccgaattaatgcgcaactgggagcacgcttggcaaactcacgccgctccctttgctgatacgttgaaccacttggcgggcttccgacttgccaattatcgtgcgcatggtacgacgaacttcctacagaaaccactagaactcaaccgcatgagtcaagcgacactagacacaatgtaccaagttgtcgctgacagcaaggacattttactaagttacctgaagcgtaaggcccagttactcggtaaagatcaactagattggcaagatattgaagccccactaaccttgggacaacttcctaaccaaacttacgatcaagctgccgattttgtcattaacaactttcgccaatttagtccaaagatgggcgctttagcccaacacgcccttgaacatcgttgggtcgaagctgagaatcgccctaataagcggcctggtggctatatggaaaatctaccagagacccacgaatcccgaattttcatgacgtttacgggttcacctaatgacacagccaccctcgcccacgaattagggcacgcctttcatggcagcgtcattcaagatctgccactttggcgtcaagattacgcgatgaacgtggccgaaaccgcctcaacattcgccgaactgattgtcgctgacgccagtgtcaaagcggccgatgatgccaaaaccaaattaactttattggatgctaaaatgcaaaatccgttagccatgtttctggatattcgagctcgcttcctgtttgagacgcgcttctataccgcccgtcagcacgggatcgtcactcctgatactttgtcagacttgatgctaaccgcccaaaaagacgcctatggtaatgccttaaatacttaccacccgatgttttgggctagcaagttgcacttttacattgacgacgtcccgttttataactttccatacacatttggctaccttttcagtctcggtatctatgctcaagctaaaacacaatcggactttgaagaccgctacattgccctattgcgagacaccgccaacatgtcgaccgaagccctagctgccaaacacctcggtgttgatctgaccaaaccggccttctggcaagctggtgtggctttgatcaagcgggacatcgatgaattcatggcgttatccgcaccgttaatctaaggaatggaagtgagcacatgtttccagaacgtttaagagcactacgtcgggggcaaaaaatgaccctcgctcaactcgcggcggccctcaatcaaatgccgaccgcagacaagacgactcgtcaaaataccgcggctcaaatcggtaactgggagcgggacttacggaccccgtcctacctagaagttcgtaaattagccgaatttttcaacgtcacgaccgattacttgtcaggtaaatcagaccaagaagagtatgacctcggtcgcatctttttatcgggcaagccgttgacgtttaatcaagaacaattatccagtgaagaccgctatgaactgtttcagttgatggatggttacttacatggtcgccagcatcgagtttcaacggatgcgaccggccaagaagaattagacttacactttgatgactaggagttttttatgaatcccaagaagttaaaacaattaaaaaagcgggtcaaaaagcaagccggtgccccgtatattcaacagttaatgaagtaccgcgacttatttaaggatgatccccaaattctagtactgatcaataatgtcttggaaagtgaccgcttgctggcagccggcttagctccccaacaattgccagtcttagaagtccctgatgattttcaggaccatctctttgagcgcatcaatcagcaatatgccatgggtgatcctgctggtgatgcggcttggaatcaactatcagccgctctcccaaaagttgaccaacttctacgcaactttcgagactatatcgaagatcagtatgggatgtgggcctacatcagtgcgccatttctgaaagacctagctgacttcaccggcagcgcaccagttctggaagtcatggccggtaacggctatatttccaagggcctcaaacgtctccatcctggtcagccaatttataccacggattcaaaggattggacacacgaaactggcaatcagacaggacgccacccagtcacgacgattgaagcgttggatgccgtcagtgccttcaataagtacgccgcaactattaaatacgtcattatggcctggtcaccggacaaattgactattgattgggacttgttacaagctatgcggcaaagtccttacgatatcccattgatcgtcattggcgaaaaatacggcgccacgggttccaaacaattttgggaccacgctaattatcaggataacgaggccgttaccaagttaaatgctcatttccgaccattcgacctgattcacgaccacgtctatgtggtccgataattgaacacgcgttaaattaaagtcgtgctttcaggattaaattctgagagcacgacttttaatttttccgtcatagctgaatctcttttttgccaaattcattcgtgatttgcttaaatcttagcatcacattttcaattgttgcagttgttccaatcccgccaccaacgatgttcgtgaaattcccccggcagcgagactttggtcgtcaaattgattaagcgtcgcataaagccaaattccgagctgcaagaattcagcttccgtcattgcgaactgcaacgctaacaaccgctgagcggcttgagcataggcccttctgtcaattagttgtgccaattcgacttgatgtggcaacggctgatcttgatcttgcggaaacaccacctcagttgtgcctcccttatgacgactaagcgtgtaccctaaccccgttgcgaacgcatgtaactgccgcattaaccaatcactttcatcttgcattagcattaatccccctaattgtgtgccatccaataaatcgctaaaattgtcaaaatgactgataacgtacacatataccagtaaaattgtttttccggtactgttcgaccatgatttccctgataggcatccgccatactagtgataaacgtcgccaaaattgtatataagatcaataacgtaaacgcgtaggccgtccaagccgtccccatcggttggtgcattgcttgcaagccccagccaatcaaccatcccaccaataaaagacccgtaggcgctgcaattaaccgtcgcttcatcctcatcactccccctagaattagcttcattatccgcttttaaaactcccagaccaagcagaatgacgccctaaaattatatccgcataataccaagccttttctgcacgaaatattgttaaaaggttccggttaactcgattcctgttcgtcagccggtgcgcgtcctatgccgacctccggggctgggtgacaattgctggaacgcagccgacgtcgatttgagctaacgcccaacccgcgtcatctcaaatacgagtcttattctaagccggaagcaacccacttccgactaagaataatttggctactgagcattgtcacccagcccctccagtcgggaagccgctcgaatggctgatgaacagccacttaacttggtacaattagtcgctgactattttttattggaacttttagtgaaatatcagtgtgtattctctactttgtcgaaatattcaactattactacggtaattcagaaatggtaagttatcacaatagcatcttcaacctgacagttaattgacaaattactgtttgtaaaaaacaatgacaagtccagcaaaagttgggtacgcacatgtccgccattcgaacactatcccgactggaaggcgtttcggtcaatgctcagcggtgaaatttcacttagcaagcgtcctttgcttggttagtggaagaccagtatttaagacgtgggttgcggcttaaatctgtgtccaccgcgttccagcaattgacggaaatgcctggaagtcggcgtaggacgcgtttaaccaagcatgtttacgctgattcgaactttttccagcgggcctagctggttacttttgatcttaaaccggaaccttttaacaatcattcctgacctatcctagaacaaaaaagcctgcaatcaattgattgcaggctcgttcacactgactattcgacgttgaactccttgaaataactggttagtggtttcaattcgttcgcgtcatatttttctttgaaggcactgacagaagcatccgatgtcttggctggatcaacattaaggatttcaactggtaacccccgtttgtccgtaatcttggcatcaattaggaccggacgaccagcctttaattcggtcatcgcagtttcgaaggctgcgtgcagttgatcaaaatgttcaacacggatacctttgacgcccattccttcagctatcttagcaaaatcagcatcaatcaagtcgataccataatatggttgcggcgcatcttcttgttctgatttaataaagttcaacgtttggttagacgtgacaatattaaagattggcaagtgatacttaacttcggtcaacaagtcttgcatgaccattgagaaggccccgtcgccagcaatgttgaaggcttgccgatcaggataactcatcttcgccgcaatcgcaccgggaacaccggcacccatcgtggcaaatagtgctgaagtcaataatttttgcttgggattcatctttaggaaacggaaactattaatcgtattgtcgccaacatccattgagaaaactgcatcatcggcagcgacccggttgatttcttggtagacttgttcgtattcaagtggatcggtcgtccgttcactcagcttcttcaaatactgtttccagtcagccatatctgctttagccgcttggtagtatggcgacggtgacgctggttcacttaatgccaaggcccgtttgatgaagactttagcatcgccattaaccccgaaatccaaatgatggtgccgaccaaacttgccaggatccagttcaatttgcacatatttgaagtcgtgagtcgtgtacataatctgtgcgaacgaataatccgcgccaactgaaacgaccaaatcggtaatccccatcagttcatccgccgctttcgaggctgcccgataagcgcttcccatattaccatcaaagctatcaggaatgacgcccttggctaacccagtgataataatcggtacttgcagacgctccgctaacgccatcatgtcctcggttgcaccacgcgtcccttgaccaacgtggaagacggggtacttggcgttcttgatcatcgttaacaccgtcttaacttgttcatcatcaatagtaggaatgccggtcagtttagcagggacacttgctgaatcgtaattaagatcaggaatttcaacatatccaaaatcattaggaattgtcaccaccgcaaccccattttcacgataagccgtccgaatggccttatcgacgacgtatggtaagctttctggtgtcatgacggttcgattaaagaccgccacatcactaaaaatcggttcttcagcgaattcttggaaataatcatagttcatattagtatgagcaacttggcccaccaaggcaagtacgggcacgtgatcttccttagcatcatacaacccgttgagtaaattaacggcaccaggaccggccgacccaaaggcgaccccgattttacccgtcaactttgcatccgctgccgcagcgagggcccccacttgttcgtgacgtacctgcacatattggagccgttcttgctcaacatccaacgcgtgcatggttgagttaaacgatccaccagcatagccgtaaatctgtttaacatcccaagcttcaataacttttaacattgcaacagacgcttcaatcatctttgccatagtaaatgccttctttttaaaattattgtatacgttttcatttacggttatcagaatacatctaaattgttcaaaattcaattgtaaacaatcattattttataaatattttcttaactaaccaaattcgatgacctgacactggtccgaaatcgtgttagcctgccgttgttctggaaaatattgaacgcttatccatcggcttaatctaaccaatcagcaaggtgaaataatgatgaaagataaagcaattaatattctgactgccgaactgtcagcactccccgttttaataatgacgtactatgcgcttaccgcgaaaccgactggacagtggcagctgacctttagtctccctgtttattggctgatcagttccgacctgttggcctatccctggctcctcacccggattccctgcttgcgccacaacccccttaaaatgaattcactggctctaaaggcaagctcaagatacaactgccggctcaacgaacgggtcgcgcgctgggatgatgagatgaatctcgcgattttcttactggaacgcggctgtctaatgttactgtcagaaccactacttttaggcgatttaggctatcatagtgtccgacggttatggtattgatggcaataaaaagcacccatgctgttcagttttatgaacagtgtgggtgctgtgtgcattatttaagaatgttggtctccaagaaggcgacagcagcttcttgaatcttgtgaggtacatggtgaacgccaccttcagcgcgtttaaagacagttgccttcagggctggctcatctttaaaacggtgcttaaaatcacgaatatactgataaggtaccatttgatcggccgtaccgttgaaaaagaacattggtcgtcccgccagtgcttctgggtgttcagataagtcaaactttgccaattgttgataagtttgttcaattagttctgctgggagcttagcttgtaatgccgctggtaattgtgcaacttgatcggttgcaaaggccaccggttctggtgaaccaattaacgagacaccagcaactaccgtgggctgcgttgccataataccggcagcggtaatgccgcccatcgaagttcccatgacaccgattttattagcatcactaattccagcagccactaaggccgcgactaattgtggaaattccgcaactgaatgtccaacaatcgaccaaaaatgttcaggatgccgatcgagatcagtcccatcatttcgactgccatgtaaatacgctgtcgggagaatgactcgaaaacccgcgcgtactaactgataagccgtacccagttcagtcgctgtctgatttgtccaaccatgataatcgatgatcgttggtaacttagtttgtgcttgactagctgcaaacacgtgtaatacgggcaagtcaccaaatttggtcgtccgcaccaccacatcttcaaataaatttgttgtcatgtttatcaccgtttccaaaattaatagttaatagtgtagcagaagcccaaacgaaaaccaacccaaacgcgtccatcgtggttaaagcttaaccatcatggacgcactcgagttggctcgttttaacacggttagttatcagctaacgtcatgcctttcaaaactacttttcaagtgtatctaagaaatcttcaacttgcttttgggtcttacggaatttgtcaacatatcgaccaatttcttgaccatcttcaatcccaacgaaactaggaatccccatcacacccatgtcttgggcaatttcaatgttggcgtcacgatcaaccgtgatccagtcatattgatcgtacttcgcttcgatttggggcattactggtttaataaaagcgcaatccgggcaccagtccgccgtaaagaataacatgtgtttacccgtcttgatacgttcgcgaatttcttcgtcgcttaaagttgcagttgccatgaaaaatgcctccaatatctttataataattatagtttaccacatactaaaagtaagtaaagtcttttgctttattttgttgctcggatcagcgcttgcttgagatccgctgctaaatcagcactattttcgatcccaacggatagccgcaataagttagcggtgatcccctttgattgtcgttgctcttccgttaaatctgcgtgtgtctgaactgccggaactgttaacaggctctcgacaccgccaagactttccgcaaacgagattacgttcaatgctcgtaaaaaggtatcgacgtcggtacccgtagcgagataaaaactaatcattccaccacgtcctggatataagacgcattcaacgtgttcatctgcctcaaggaccgtaacgagttcctgcgcattagcctcctgctgatgcaaacgtaatggcaaagtcttcaagctccgtaagagtagccaagcgtcgaacgggtcaaggaccgcaccagtcgtcaccagattaaattcaagcgcatcagcatccgcctgcgacttgactaccactgcaccggctaaaacatcattatgaccggctaaatacttagttgcggaatgaacgacgatgtctgcgcctagatccagtggcttttgaatcaacggtgtatagaaagtattatcaacgattaacttgaggtcatgggcgtgtgcggtagccgctgtggccgtaatatctatgaccttcatggttggattcgatggcgtttccaaccacagggcaacggtttgatcgtctgccagtgctgccaatgtcgcttgatcctgcccatcccagacagtaaaatccaaatgataatggtcgtgtaagaggtcaaagaagcggtacgaacccccatataagtcatcagacacaataattttgtcaccactattgaaaagcgtgaaaacgagctggattgccgccatgccagaagtcagcgcatacgcagcgatgccgtgttccatctctgccagcactcgttccaaaatacagcgggtcggttgggcctcgcgcgggtagtcaaatcctgtagattgtcctaaaccagcatgtcgatatgctgtcgacaagtagatgggcgccgaaattgccccggtcttctcatcatcactccgattaccagcttgtgctaaccgcgtttcaatgtgtaatttctcagcttgttttgtcataatctcaatcccatccaatctagttatggtcgggcagtctacagagacgccagtgtaaaaatgactacaaaaaaagccgccatcttcaagggacgccggtcgcgtgttaccacccaagttcaattacgggtcaccccgttaaactcatcaagtcattattgactcactggagtatcggccagtcccgccagtacagccttgcgaccgcaactgggcattccgagttcatcttcatcaggcgctaccttaccgctttacactccccacggctccctgtcaaaggtataacctgactactcttctcatcaacatgttatttaatgatattttcatcttactctcataataataggagcgcaagccccaatcttatttcagcacaataaaaaatggtgccagcattatcctgaccaccatttttacagaaacgcattcgacactgcctagctatcccaataatttcaagacaatcacaaaatatcctaaaatcaaaatactcaaccccagcgtcttcaagagggctaaccactggccccctgcagttcgacctttagggcccagacaaatcgcaacgccgccacaaatcacggccaaggttcctagctcacggccccagtttgcattcaataagtaaatgaacggtcccactaagccgctgacaatcgcgacgatccccagtattttcagaatcaagcggcccagtcgcttatcctgttcgtcataaatttcatgtttctcttttgccatcaaaccagccaccaatctttatgaactactttcagtatgccgtatttggtcacaatgagcaagaaggcggttacaatatcctggtcaaattactgaggcatcactaggctagcttgtcataccttaccttgggccttgccggcacttacccgtgataacagctgaatcaagctaccaaattgaccatgatgatactaaaaattaggtgttcaaaattgacacccgctgaacacccaattggcaataactatttttcaattataacctgctaaacgacgccattatggctgtgttgcaacaacttgccatacgttccccttagccaactgctgttgttccaattgaccttgggcgttaatccgaaaacgacccgctaagtgtgcgacatcggcgttggtattttcataaacttccacgtaaactaaaccaccgctttgatactgattaaacacaaagttttgcttattggcggttgtttgttgatagtccttagccacttgttgccaagcccaatcattaatctgactagctgttaactgctgtggattggtcgtctgctggccgctagttgatgatgaggtcgcggatgcagactgcccggtagttgtttgactagttgcagtggtatttgaatgtccctgcgagctagctgcagtagctgtcttactaccctgactagtcgttgcactagcttcggattgtgactcattagctgaagttgtggaaactgacgatgctttagttgacgacgatttagttgacgacgatttagcagctgtcgattgcttcgtcgactttgctgaagatgacgcgtcttttttagccttagtctttgacacaactgattgtgtttcactaacccgcgactgactagactgatggtcggcttctaagtaataaccgcctcccagcgcaatgatcccagcaatcacggctgaactaactaacatttttttcaagataatcaactccccaaagattaattgtctgatgctaactacagcatacgctatgttgtctcactttaccaacgtttacctgttctggatcgaaatttaactttaaattatatttggctcagttggtccatttttgggcacctaagattcattgtgccatccttttcttgactacgtatctcctcaacaacaaccgtggcatcagcagaaatgaattttgttaacttgaaagctgtttccacaaccttatttctttaaagttcattttgccatcatactgccccttataagtatatcgtaaatgacacccgactacggcccaaaacaggctaacaatgtaaccgtttcataatttgtcatcaaattgttacttatgtgaggcccccttcgcatgctatagtaatcaaccgatacaaaaaaactaggagtgtgtgaatagaatgccacgtaatttaaaagaagaagttgtctttaccgccattatggccggtttaatggtctttgtgatgaccgcctataacgttacccttgctcaaggtttcagcaatgggttagtaatggcaatccttagtggctacccactcggtttattcgttgccatcattttagacttattggtcgtgggaccaattgccaaacgattagctttcaaatatatcattaatgattacatgcgcaaacgggttgtcttgattgggattaccatctccgtcttgatggttcttggcatggtaacttgcatgtccctcttcgggattgcagtggaaggtgaattgtccggaagtcacgttttagcgacttacggtcacacttggatctttaacttgattgttgcattaccactccaactcatcatcgtcggcccaatcgcccgcggtgtgcttggaaaaatgcaacgggcaactgctaacaccgagtcagcagctgcaatgaacgaagaggactaatctttcagtccattgacggacggtcgccgggataatcttatcctgatggccgtccgttttattttacgactatccagtcgaccaccgcttttgccgaatagtccaccctatgaaagtcttatgcgtgatctgtacgcaaaaaaaaacgcgtgtcagccatccgaaaatggttaacacgcgttcatcgcggcactggtaaaaccagcgggagtgacactccacaatgtcagtgacccagacactctgaaatacgtcagagaaacgtgccccgctatcaatattagtcactagccgctcgcgcggaaccgttattgctaacgatctgactctatcgactcatcgcatggactaccatatcatcttcattgataaaatgcaagtcgcaccgccacaaaattcgtggctcctactcaccacagttgggccgcagtacttaacttttcgcaaccaaaaaaattgagtatcccgttcgatttaatgaacgacacactcaattccattggtattttgattttggcttggctccaatatcaattcttaccttaccatagtcatgtaaagatttagtaattaactcgtaaagattacgtttaagcttccgccgccgtgatctgatctaagcgatcagtctgagccgtcagccaatcggttaataacttttcagcgttggcttgatcagcgagcacgtcggcaacgcttcccagctcatcaattcgcaatcctgatggtaacgcatcggattctgcaatcatgtaaacgttgattggcagcgtatcctctgccgccgtaacctttccaatttcggtcagattagccagtggcaaattaataacactcgtctccaaccgaaagctgatagctggctcatgcttagccgtcagcgtcacttgggcaagctggtcggcattgagtgccgctaccagcttcgccagccaaggcttaaccttggtcgctagtttggcataggtaccagtcaagctatcctgcgtaaccttgtcagccgtaacatcatcaataaaagcttgtacgtttcgttgcataaaacattatccctcattcattattcaatttcgttaatttgcacgtcgccagcgagtcagtaacaccaacgtataaaagttgatccccaatccaatcacacccataacttctaacgccagtttaatttccatgccagccgtactctgatagcccgacattaaggcgctgacaagtcccaagctatatatcagtacaactaaccctaggacgtaaaaacccagcatacgattaatatacactgctagaacgcctagaaaatataagactagggcaatcagcaacccctgccacatttccgctaccgaaatattttttgcctgcaggtgaaaatggctagtcgacatcatccaattgacgataccgtaacaaaaaaaggacacaaacgcaaatgcaactaagcgagtcagtttcaacaaatcactcctattattgggcaattaagtcaataacggctgaccgttcaattcccgtgaagtactgatttaaatcaatatctgccagcgctttagcgatggcctcatggtcgtaccgcacacctttaagggcggcttcaatatcttgaacgttgccactaccaaagaaatcaccataaaatttaatgttattgatcaagccgtcatcaaccgagatccgcgcatcaatggttcccatatcaaagtgttgacgccgcttaaccgagaattccggtgatttaccgtaaacccaatcccaattagcataatagtcttcgtaaattttatcaatagctttttgttgttcaggtgtcacgtgatattccttatccgcaatctgatccaacgaatcaacatggaacaactcttttaacagggcatcctgaaattctggcaccgtgatattctgatattctggcgctaaataaggccgtaaattcgtgacccgactccgaacggacttaatacctttggaagcaatcttgtcggtcgggactgttagcgcctgtgggacaacgtttaaatcaacattcaacatcaaagtgccatgggagaacgtcttgccattccgtgaatacatggcgttaccggagaatttcttaccatcaacgagcaaatcattgcgaccactgaccgtcgctgtcgtcgcccccatatcgtgaagcgcatcaatgattggcttggtaaatgtcttaaagtcgccaaactcttgactgtcactatccaccacaaagctgaagcagaggttaccaagatcttgatacacagccccaccaccagagagacgccgcgttacggtaatgtgatgttcccggacatagtcggcattaatttcttcaagggtgttctggttccgaccaacaatgatgcacggttcttcatagtagaacaaaactaatggttcatcgaaatccacgttattcattaaatattgttcggttgccaagttacggccaatctcatgatctttcattgcgacataatacatgttttaaaatctccttcagctttaggttactttaatcatacagcaagatgaaaaaaggacccacaatgtgagcccattttttggaagaatcatacaaaaagtttggcgtggcattcttcacaccacaagatgactgattcactatccacatccgtgaacgtttgattggcggcaatccgttctccgtggacataaccgtgccatcaatagatggaggttgggccagtcagttatccgaaattagcggaaacgctgctatactgcactagctatcacttgacgggtttgttacaacaattgggtaacagtttgatactgacctgtgactcttccgataaatccaatatagcatacaatgtaagcgattgcaaaccgagtaaaaaaacaacctagtcagccgaagccaactaggttgccgaaacattaatagcggtcgtaatcgctattccatttcaatatccttagtataaagccatttggacgccggaacaactaatatgcctagccttcaagcttagcaacatagtgcgttgcaccggagcgactcagatatcggagccacgtgtaaccctcagcttgaaccgtcccattgtaataaaccgtttcacctgggttatattcaccgacaacgcttgcgcgcgtacttggcgccgtacgaatattagtcgtcgttacgaagcggaacgccccttgactgtttgttaccggcttagacgtcgtatttccggtagcggcattaccactaatcgctacgtaatgttgggcgcccgaataagacaaataccgtaaccaagtctggccgttagccgttaccttagcgttgtagtagactgtatcaccagcactataggtaccgacacttggggcatttccggccggtgtattcttaatcgccgttgtttgcgtaaagcgataactaccactttgaggcgttacttgcggtttatcaacattggtcgacgtactctcaccactaatttgcacataatgctgggcacctgagtaagacatgtaacgtaaccaagtctgaccatttgtcgtcaccttaccattgtaatagaccgtatcgccagcattataagacccaaccgttgtcgcactagttgcaggtgaactcttgattgctgtcgttttcgtgaaacgatacgacccactggttgcaaccacgtccggtttagccacagcaccaacctcatcaccactcatagccacgtaatgctgagcgcctgaataggataaataccgtaaccaagttgtcccacccgtggtaatcttgccattatagtaaaccgtctcaccagcattataagtgccgaccacttgagccgttttgcttgcggctgatcgaatgttggtctttgcggtaaacttatacgacccactagctggcgtaactgtcgcctggttattattatcattagttgttgtttgactaatcatcacataccgtgatacgccagaataggactgatagcgtaaccaagttgcattaccgaccgttaacttaccattgtaattgactgtttcaccagcgttgtaagtacccactacggcactcgtggcgtccggcgcattgtgaattgtcgttgtcttagtaaacttatgtgtaccactggttggggtgacgtcttgatcaggctgaacttggttattatcatttccgccacttgcctgaccactgagcgcttcttgatcccactcgtgtagcttgttatattcaatgatgctgatcagcgaactcgcgtacgttggcgcggttgcgtaaccgtcttgttgcaagagactggcaacgcgccgataatcggtaaccccaattaaattgctgtaacgcggattgacaaccaaaaaggcgccatgatcttcaacactagctgaccaattcgggtacttccgaaaagcgtcttgaatcgtaatgtattgtgagccattccattcctgggttgggaagtagattgattgcccttgataacttcccttgataccgaataagttatttccctcagttgctagttgtgactgtccccagccactttccagaatcgcctgtgcggccgtgactgatggcaagacttgatacttgttccaaccagagattgcccccgctttaatctgactcaggaagatttcctgactagtcattgcccgcgtggaccgtgccatcatcgctgatgactggaccgcatcagccgccacagccgtctcaatctttggtgagattttcgcggctaccgcctgctcagtcgcttgcttaggtgcggctgacgatgcggctgatttggctacttcactcgtcacagtcgcgctggattggtccgtagtgacatgactatcctgacttgcggccgcgctggctttagccgtctcattagtcgtactgtgactggcttggctcgtggctgcactagctttggccgttttatcaagttgatcaacagcactagttgtggagtccgccgtagcactagcagccgcgttatccttggcagcttcactggcggaggactggctttgcagtcctgtactgtcagctttagcggcttggctggctgcccgcactgtgacacgacttgccgcactggtagtagacgtcgtcgtactggttgattcagcttgatcgtcagtcttggcaccgtcactggcaactgattggtcagtcgcaccagccgctgtcgtttccgtctgactgccagcacttaaggtcacttgttggcttgcagctgaagcagcgctgtttcccttagtcgcagctgccggtttttgattttcacttgccgtatcagctttactactcaacatcggcagcaaagcggtacttagcaataatgaagttactactttttttgtcattccaattttcaattttaaaatccccaaactttccgtgagttagctgttagcacaaccgatttaattcccctgtagcacctgctattacagaataatattagcatgtcgaagagggacattcaaacgagatcgcttcgaattattttattaatatcaattgattgacaccgttatcattttaactgattgatcagttaacaatttgttatcgttgaccgaattgacaatcgctgcaagacgttatgaccaggggcttttccaaaatcaccttgcttctcaattactgtatttaaattaaatgtgactgattgatcgattaacgaccttgaagaatattatttttcaatgactagggtccgtcttaaaactacttaagtaagatgcaaattgaggcaatgtagaccgtagccagataaacatgagcgagcttatcataacgcgttgcaatcctacgaaagttcttcaactgattgaagaagttctcaatcaaatggcgctcacaataaacgtggtaatcacaggtccacttgtctttggtattttcctttggcggaatggtatagacgcctgctttatcttcaatatactggcgaagtttcgcggtgccataggctttatccgcgataatatttgattgagaaatatcgaagccttccagcaactcactggcaacttggctatcatgtacttgaccacctgttaggcgaaaacccaagggattccctaatccgtcaacgagtgcgtgaatcttggtcgttcggccacctcgacttaatccaatagcttgattttcgaccatacattcggcattttttttgccccagtggccttttgatgcgctcgaacgatcgttgaatctaagctcaagttttccatgtcgggatcgtcaatcaattcgagaaaaacctgttcgaacaagcctgaacttacccaggctcggaagcgaccatacaccgttttccaagagccatagcgttcaggtagatcacgccaaggagccccgctgcgcatgagccagaggatagcgttgagggcggtacggttgtctaggcttgatggacggccagtccggtatggcgggaagtatcctttgattcggtcccactgagcatcttccagttcgtatcgtttaggtgttgtcatcggaatgcctcgattcgtttttcctcagattatacctgaatttttagttttcagacagtccctagtaccgactgaaaaaaattagtcatttttcagtccattaaaataattatccttacaaactcaagttatcaaataaatcaatcgattttaaatgcttacattgctgaaaattaatgctaaaatatagttattaactagccatatcaaacgggggtaaccattatgttacaacaatatcaaaatatcctggtaccagttgatggctccaaggctaccgacgaagttcttcggcggggcatcgaagtcgctaagcgtaacaagacccatctcgacattttaaacgtgttggaagtcaaccaatttagtgacacgtacggcggtgcggtcagtggtgatgtcatctacaagttgtcggaagacgttcaaaagcgcttggaagaactcaagcaacaaacaattgacgctggggtgaccgacgttgatgtccatgttcgttttggtaatcccaaaacggttatcgcgcgtgaatttcccgctgaccaccataatgaattaattatgattggttcaaccggcttatctgccgttgaacgtttgatggtcggttccgtaaccacctacgtcagtcgcaacgcaatttgtgacgttttgatcgttaagccgaccgctaaaaaagaagactaacaaaaaagtctggatacgttccagacttttttagtggtttccgtgcgttgccccgtcttccccgttataaaggagctttattcatgacctggacttatcaactcactatcccgtctagcttgaatcaacagtcgattcgggcttgccttcggacctggctgattcctaagcggattcagggccagttacgccaaacgcggcggattcagctgaacggtgcaccaacgtcgattgcacaactcgtcaatactggtgattgcctgacgctgacgtttatccccagtgactttcggactccgacctcaaactatattgcggctgccacggccccagccacgattttatatcaaaacagcgatctgttagtcgttgataaacccgctggcgtgaaatcgcatcctaatcaaccaggtgaaaccggatcaattttaaatgacctagcagccacactccaaccaactcagcaggtaccatacatggttcaccggctcgatcagatgacttctggtgcgatgctagtcgcattgaacccggtcgtcgtcccgattttagaccgcttaatcagtgacaagcaaattcgccggacttattatgcctgggtacgtggtcactttaccacgccaactgggcatttcaccgcgccaatcggtcacgatgctaccgacaaacgcaaacgctgggtcaacacggccgatgcccagccagcactcaccgactacgaagtatgtgcaacaaccgcccatcagagtttagttaaactgaccctgcatactggccgtacccatcagctacgggtccacttggccgccagtgaccacccgattatcggtgatccactttacgactcgcaagcggagtcggcgcctcggctgatgttacatgcccaattgttggatctacaacttccatttagcaccacacgggtgacggtaccggccccattgccaagtttatttaatagtccgcatttaatcgagcgctactgactaagcaagttcaacttcattcagatggctaccggcgcttgccatcaaactgttgtgaaagtatctatcttgaagggtccaaaaaggaagctcagtgagcttcctttttttgacacctgcatatttatcttagccaaaaagagcttaattatgcctctaaactgttaatttgagcgataataaatcttatcacttggaatgttttggggatcattttgcgttcctaacgctacgatacggtcccgactactatcaccattatttaggtcagcattatttccaccgggcataaataccacatcataaagtccgccagatgagcctgatattgaaaaactgccttgaagcatgctggcaccatttgaggtttgataagttaattgttgatgatacttcaatccatcaaccgtcttagaatttccttgctgatcatctaatgatggcacatccattttgagtttagtaatcgtccccggagtagcgtcttgcgtcaggccaaaatcgctaaatttcatccgctgattatgaatcttgatttgatttccttgtccattttgccaagtcccattcaaacttgaataatcaccagttttaatctggccgagcgccattgtcgacttgcggtttcccgtattggcggcggtcgtttgacgttcaaaaacttttacataagaattattacttgtgcgcgttatgattcgctcagtatccgtcttaatggtggcaggaacgttatcaccccagccactgattgcaactccctttggataaaaccagtacgtgacggcagctgcaccgatatcaccatcaatatgcagtgcgcctttttcctgtttgatggtagtagtaacagcctcttcatcaccattcgcatcttcaaatttcccacttgctaaggctatttcaccgtcactgattttcgtgtcttttacggttaatttagcgccagcctcgggagattgccaaacatcgcccttagtatcatgcttattgacactactagcaacttccttccagtcacctaacaaactcccataggagccctgactgatctcattaagattcatagtcgtagccccccgttgttgagacgttgtttttgtcgactgagaacttgcgttgactgacgtactcgttgccttagttgcatcatttgttttgtgcgccttatcagtaatcactttgggcttcactttgaccacactaacgccatgcttcttatccgcatgtgacgcttgcgaggcctgctgtgagctaccacaaccgctaataaataacagtaacagcagactgatacagacagtttcactttttttcaaaatctggtcccctttttttccgctctgaatccatggcatcgtctctttaaaaattaactaatccgtcacggcggtaatccgacggtactaacgcttacgaaaatagtgacgatagttgtgagaaaagcatattgccacctaaaacggctaatatcatgacataaacagatagtgcaaaacctaatgcgatttcagcaatgattaacgcataaaatttgtcaatatggggcttcacaacattatcaataatgatataaataaatgccagattcataatcccgatggttgggatcataaagaagaacaatccagtcatgccagaaaaattaccagttccagtgagaatcgtcaaaagcaacgtgagtagattaaagattagaatcaaattcgtaattgctgcaaattgattgataaaatcactaaattgcatcgaaccagtattaacaacgcggcgaaaggcataggcaatgctaacataaatcgcatatatcccaagaaccatgaaaaacaccagcatactcgtttttaggataaagctgccagcatgaatcgcagcttccgaactaccaccagtcaatgaactagtaaaatcattggcgacattttgtgccttacgtaagattaacgcaattgataaaaccagtaaaaaggcctcaagaccgatcgaagttagtccaaagtaccgattagtcggttcaatcggatgaccgggatgccggatcgtcatcttaaaccacgaaaagtagcttccagagaactttttgacatgttggacggtatctgtggtcaaaattttattgacggtatcatcactactacgttcaaccgtattctcggattcggcaactgactgcccttgatccggaatttcctggtttggggcaaccacagcaccacatttcgggcaaaacttcgccccggctttcagttgattgccacactgcgagcaaaaaagtgcctgcttattcatttaaacatcctccaaattaatcataaatttctcgttaatcatttgaatctaccgtttcaaacttaccggtactcgtgttgtagcgcgctagaatatcattaacatcatcatatcgataagtatctgctaaatcattagtaccactaacatagcatttaatttcatacacatccgtgtgtggttcactcgccgtataatcataatcactaatatccccaccggtagccgcggcaatttctgacacagctgtctgagctgaactagacaaatcatcataagcactgcccgtaccactctgcgattcactctcgctgttgattaaactcgagtctgattcatcactggcagtggtagctttggtgtcagtattcgccgttgacgttgtcgctgcctttttattcgcaactaacgaaattaattcatggacgttcgcgtgccccatcagattaaccttgtgcgtgattgtcgtgtcagaattacttagtttaaacatataggtccccggaaacagcggaccaaccttataagtggtatgcgcactttcggtggtcaccaattcgatgtcatttgcttccagtgtggcattttttagattggtcgtgattaacggctgcatcgtggtgacgcgtaatttgtaagttgggaatagtgtccacttagttccgatttgcttaacaacaaacgtgtgatcactagaataaccgttatgttgtaagtctgttttcagatcttgtgcgtactggggatgtttttggatataggtcattaagggctttacggactgttttgtgatttttaacccagtattatcgctaactaagtgtttcgacaatgtcgtgggcttattactagtcatcatttcgacttccgcggcaatctgctgatttttaccagtgtgatattgataaaacccaaatccacctcccacaataatgacgactgcgagcacgcttccactgattcgcaaccaccttgattgctgcgtcttagctggtttatgagcttgatattgccttgaatccccgagtttctgctccgttccactggcttgcgttcgttcagcactgtcaatatgagtcagatccgctccgcaattttcgcaaaaaacattatcagcctcattttcatgctgacaatttggacatattttcatttttggtacactcctccattaatttgacatccgatgaaataagctcctcccaacactctgatttctattctgctttgcaagctatactaattatttaatagcgttataacaaagctttaataacattatatacgactaaaagaagtatttaaagacctttatagtatgttgctattttatcattaaccgtaacctaataattgctttgtcacattcaacggatcacaaattcagcatgagttcgataactgaaagcaaagtaacgtgatttaattagcatcacgtatcaaaagctttaatgaccttataacggtacttataaggtacttacagctctgtttcaagcatagcgaaacctctaaaattagtgctaagacgcttaatggattaaggaggattcccatgttaaccgagataggcaaaatcattcggcaacgccgacagcaacacggcatcaccatcgagcaattggccgaacaatcgaatgtttcaatctcgctaatttctcgactcgaacgtggtaaggtcgataacattaaactacaaagtttgaccgcaatcgctgaaactctgaatttaaaaatagcggacttctttcgcgacgagcttctccaatcacctaatgttgttgcattactcgactacctgagtgatctgccagcccatcaacgtgaagaacttgccggtacgttactcaaactactccgactatccaaatcgtgagcatttgcgcaacgcactccggacagttagttcaccattgaaccccgtgattcatctacactaaaaaatgattcaccttcctctgacaagaaggcgaatcatttttaatttatcaagcttgttaacggtcggctaagcgcccttaaagccagcatacagttcttaatggtgcgttgtcactaataacccactcatcactgccaatatgatacccaccgccatggctttgaatggttcacgaacgatgggggtggcggtcaaagcctcgaccatcgccccacctaaatacgttacaacgagccccaatacggcgccccaaaagattgtgactagtaaactagccagccacgttgtcttcaatagcaagctcctccaatgcggtcaggcacggctgaccttttgattgagtgtatcaaagtcgtcacgcgtttgcaaattgattaatagaattcataacttttatataatagttctatccaaagaaaatccccaccatcaatgacaaaaaagctcagcaccgaccattcaggtcctaagtactgagcgattatcatgaccgctatgacaggctaatgtcccccactactcaaatccgcaggccaatttgattcgacgaccgtttgcggaacatattggcgattcaatagtgccagccactgccggacaatcttgctcaaggtaaagtcatgactgcgttgccgagcgcgcgcggcatattcagcgcgacagtcaaaatcagttaacagtggcattaagccagtaatcagagcattaacatcgcgggccggagtcaacacaccgtactggccaccctgcaagtactcggctgagccagtattccacattgagacgatcggtaaccccatcgtcatcgcttcccccataactaatggcatcccttcccaacgcgaagtcatcatgaagacactcgcctgttgataatgcgcccgtaactcagtatctttcagcgcaccccgataaataatgcggtcacgaacatcgagttcagccatcaaccgattgaacgtcgctaattggtcttcgggaccagtccctgcgactgcaatttgccaatcatcgggcaaggctcgcgcaactgtcaacaaataatcgagccccttatgttgcaggtcaatacgaccagtgtaggcaatgatatgttgcgccaagtcggcctgctgaccatgagcttgcatggtcggtggattatagaacttgaccgtatgggcgttaaaacgtgagtagccttcccaatcataatcggtcaatgtcacgaccgtatcagccgctaagagccctgcgaccagttcatcttgcatttggacgtaatactgattgaggtagatatcaacattattgtgcatccacgcaatgacattgacccgtggaaaacgctgtttgattgccggagcaaaactcgtcagtaaacctcccgggagaataacggcatcgtaagctcccgacccaatcgtcgtgagtaaatcatctatttgaggcgcataaacggtcaacggatcagcgccaaagtaattaagtaccgtcgcacttgcaggccggcgcgccgtgataagcggtgcgctcagttcatagaaagaccggggttgggccaaggagtaaaaagcaacctcggcttgcgaggtcaacgcattgccgaggaccgtcgccgctcgtttgacaccatccatcactaaattctcgactgttatcaaaattttcattagcatcgttgactggcgattaaacaaccagtcgctcctttccacataaactcggttcatggaaccggaatcgacgatgttaggctgagctgattgcgtcagacccgttcatccttaactaatcaccatcactagtatcagcttaggtagcgttattataacaggaataattaaaaaccaattaaaatatgctcacaattcacattatgctagtcattgcaagttgcttcttgattaaacgtcagttagctaggttctgattaagacgtcataggctacattccagcaccaatcagcacttgttgacataccactagtattgcttgatatacacgcaatctgaaataagtcgcccatgctgagttgacagtatccaatcgacacaattaatagcgcacaaaaatagcgttgctactggaggcacaagccagtagcaacgctattttcaaattaagattttaactgcttattttaaacccttccattgccaatcattaacttctggcaagtcagttccggcatcccggatataggcattgtgtttagcaagcatattatccatggattgaacgaaggccgcaccagtgttttccattgctggttgcgccgcaattgccgacttagctaagtcgaagcggtccatctggttcatgacccgtacgtcgaatggtgtggtaatatcaccattttcacggtaaccgtggacgtataagttatggttgtgacgatcaaagaagatgtcacgaactaagtcttcgtaaccgtggaaagcaaagaccactggtttgtccttagtaaagtaatggtcaaactcagcatctgacaagccccgcggatccttttcaggactacgtaacttcaagatgtcgaccacgttcacgaaacgaatcttcatctctgggaaactgtcgtgtagtaattggatggcagccaacgtttcaagcgttggttccgtcccagcagctgcaaagacaatgtctggttcgctaccttggtccgtacttgcccaatcaatgataccaagaccattgtcaactaattgcttagcttcttcaatgctgaaccattgttgacgtgggtgttttgacgtaaccacgtagttgatcttttcttggctccggaaaatgacgtcaccgacagctaataacgtgttggcatcggctggtaaatattcgcgaatgtattctggtttcttttcggccaaatgagttaatgcacctggatcttggtgggtataaccattatggtcttgttggaatacagttgaagccgcgataatgttaagtgatgggtactttttacgccaatcaagttcattggctttacgtaaccacttgaagtgttgcgtcaacattgagtccacaacgcgtaggaaggcttcataactggcaaataacccatgacgtccagttaagacgtaaccttctaaccaaccttcagcttggtgttcagataactgagcatctaagacccggccagctggtgcttcatattggtcactatctggatgaatgtcttccatccattgacgattagtggtttcgaagacaccatataagcggttagacatggtttcatcaggtccgaacaaccggaagttatcaggattcttcttgatgacatcccgcaaatagtctgaccaaacgatcatatcttgcttaacattcgcgccttctttggacgtatcgaccgcataatcacggaagtttggtaagttcaaggctttcggatcgaccccaccattggtgattgggttagcagccatccgactgtccccagtaggaataatttctttaatatcatccttcaaagagccatcttcattgaagagttcttttggttgatatgattcgagccaatcaactaaagcatccgcatgttccatgtcattttgatcaacaggaatcggaatttgatgagcacggaatgaaccttcgatcttatcaccgtcccatgacttcggaccagtccagcccttaggtgcgcggaagacgatcattggccatactggcaatgtcgcatcgtcattttcgcgagcatgcttctggattgccttgatcttttcaacggcttcatccatggccttagctaaggctgggtgaaccttttcaggatcgtcaccttcaacgaagattggttcccaattcatgctttcgaagtattccttaatcttagcatcagaagtccgaccaaaaatcgttgggttagaaatcttaaaaccatttaagttcaagattggtaaaacagccccgtcgttgattgggttaatgaacttcgttgattgccatgaagttgctaatggacccgtttcggattccccatcaccaacaacaaccgcggcgatctcgtcaggattgtcaagaattgccccaaccccgtgtgaaattgagtaaccaagttcgccaccttcatggattgaaccgggtgtttcaggtgccgcatgggaagcaaccccacctgggaatgagaattgcttaaagagcttttgcatcccttcaacatcctgcgtaatttctggataaatatcggtgtaagtaccgtcaaggtaagagtttgaaaccatcacttgaccaccatgacctggaccttcaacgtagaacatcttcaaaccgtacttgttgatgacccggttaagatgggcatagataaagttttgaccggcaatcgtcccccagtgaccaattggatgaaccttaacgtcactggccttcaatggccgttgtaatagtggattatcttttaaataaagttgaccaactgataagtagttggcagcacgccagtacttatcaactttttgcaaatatgctggtgatgagtaatctgttgtcatttcaaaaacactccttaatttgcttttcacttgaacgctaactgtttaaatgttttcgtttacaagttctattttaacaactcatttcaaaaaatcaacctttttgttaattggaacggtccaattttataaattaaaacaaaaaaacaaggctcatcccttgggacaccttgcttttagattaatatattttttaataatttgtacacagaatgattgaagcagcccatcaattagctttaatatgcccagaattaacaccggcgccctgattagttagtggcaaccagttcagtgcttttaatagatagcggtcccagaaatcccactcgtgcgctccagaaccgaccaaatattcatgcgaaacttttttggtcgttagaaaatgatcaaattcatcattcgctgactttaagccgtcctgatcgccaatcgccataaaaatcgcgggtaaaacgacgtgagctgccagtaaattagttacgagcacttgcaggtttaattccgaatgaccagcagctgctagatctgggccaaaaacgccatgctgatatgcgactgtttccgcaaaccactgaggctttgccggtaacttttccattccgggtcgcacattcagtccggctgataaactcacaatggccccaaaagtatcgtgaaattttagtccgttatacagcgccccgtaaccacccattgataatccgccaataaaagtttggtcacgctggtgtgatagtggaaacgtccggcgtgtaaaatcaatcaattcctgaccaataaattgactatacgtctccccagaccaaggatgatcagtatagaaactattctcgcccgctggcatcacgacagccaggttccgttcgtcggcccagcgctggattcgtgtgccactaatccagtcgacttcactacctaagataccgtgcaataagtacagggtggcaaacggaccctgaatcgggcgcggcacgccctgctcatctgggaccaatttatcagttggtaaacacaccatcaggggaacggtccggtgtaaactagccgccataaaattaatacgaatcagtgccatgacacctcagactcctaactattcgttgacacaaacgttgtatacttcatatattgataatgtaatcgcatattagacacttcaaagggtgtcccatcatctaaaaagaagatcccactcatcaggcccaccggttcattcggctgcaaatgtagcaactcttgatcagtcgtattggacgcatcggccgcaatcgataagaatgatttggtcactgcggcgtgcaaggtcttttgcacgtaattaaagatcgatccactgaccacttgtcggttcaactggggcacaagcttgattggaatatagccactttcaatcatgaaaggctggtcatccagtaatcgcagccgtttgatttcataaacaaactcgtcagcagttaaaaataagtcttgttgcaactcttgacttgcaggaatgacgcgaaagtctaataattgaatactgggcttagcaccctcagtatttaaactgtccgtaattcctaggttagttccttcatacttaaacgaagattgatttttaagatataatggattaatgaacgttcccgaaccccgcttcttgaaaatcaggcccttattggctagcacgttaagcgcgcgcttaatcgagctacgacttacctgatactgttcgctaagactacgttcatctggaagcttcttatcaacaaattcattcgccatgatccgtttattgagatcattgatgacttgttgataaactaggtcagccattgtaatccctcctttgaggttatttcatacttcaagtatagcagaattaatggcgtttgggtgaattgttccggtccatttataaaattggaccgtatttttaataaatgtgaggttaacaataatgtcaaaaaagaagaaaaaagatcaattaggtaaaacacttgttgaaaagattttggataaagcaaatatcagctatcaacaatatgaattcccaaccgaaacggaaggcgacgttcaacaattacaagtcgaccacctcggtgttgacgaacatcatatctacaagaccttagcgctgattggtaacaagaccggtcccgtcgtcggcgtcttgccgttagatgagcacctcagctataaaaaattggctaagctatccggcaacaaaaaagttggcatgattccattaaaggacttggaacggactaccggataccaacacggcgccaacacaccagttggtatttgggaaactaagaagtttcccatctacttagacgagaccgctaagcagcaaggtaagattctcgtatcttcgggtaaaatcgggcgttcaattgaaatcgacgctgatgatctacgcaagctcgtgcacggcacttttggtccaataacggagtagccccgtggataacttgatcaagaataacggcatcgtcttgctggtcatcattggtttacccggactatttgcttggtcactgacgattatcaaccgacaaaccaaagcgaatctggtcaaccactacggtattaacagtcaggtctactgtggctttctgggcatcatcatccacgagcttagccatctaatcctcgcactgatttttcgccacggcatccaatcggtccggctgctcaaacgccctcacctccatcctgaagatgagtcggcggatgatctggcactaggctatgttaaccatacttggaatcggcacagccggtatcaagtcattggtaacctgttcattggtgtcgcccccatcttcggatgcacagcggcactccttggactagactggctactcgctcctggcctatttcaagccatcttcaaattagctgatacacccgaacaaccacaatgggctgcaagttttcacgcgttaaccagtacgccaacgagttggtggcaactattaatgttgctctttctaaccctcgtcattgtgattggtggcttcgatctaaatcccgctgactatcagaatagtgcgatcgggttgtatagcaccatcggcatcattatcgtgctgactaccttactgacgttcatcggtatcaccggttggatccatacgttagttacttggggactaatggtcgccattatcttgggctactcactactcgtgtccctactagtcatgttggtaacccatcttctgaccaaccgtgcctgatttggattgccagctttaaaaccagaataagggctaaaaaggccatcacaagaattcacgatacattcttgtgatggcctttttcgttagccaatataaatggtaattgcatcatctgataacatgatctcagctcaaagaactagtgattcaactagacgtagggatgccattacgccttatcatccgccgtccactcagccttaaattggtcaacaaactcgtgcatcaccgctgtccggtgggctgccagtgctttggcagtatccgtattcatgagagctgctaacttgaacaacttttcatagaagtgattgatagccgtgccgggctggtgtcgatattgttcacgcgtcatatgttcacgtggcgcaattgccgggtcatagattttttcaccgacatgacctgaataatacaacgcccgggcgatcccgatagcgccaatcgcgtctaaccgatccgcatcctgaacgacttgcccttcaagacttaatttttgagggccgttgaaggatttgctgaatgacatgtgatcaataattgcaaaaatagccgtttgatcggcagccgtaacattttgcgcgttcaattgatcaatcaaatcttgatgcgccttcgctgggtcggccatcaatttatcgtcgatcacatcatgaagccaagctgccgctaaagtcagatttaaattcgccccttcggcttttgccagccggcgtgctagccggttgacccgctgcaaatgatcgcgaccatgcccactatgatcgtgagcaagcttttgcaaagcatacgtttgaattgccgttaattgtgtttcagttatcatacactcatcctatccctgggtctggtagtacgcccgtaacttcttgatcgttccccggctaaaggtcaagtgatcatgattgtccatactaatcacgcccttattaaaatcaaccgtaatcacatggtcaaggttgagggcataactttgaaactcattaaaaaaatgcatcgctgtcagttgttccttaatcgtatttaaattcttatgtacgacataggactgggtcgtcgtcacgattcgcgtggtccgcagcccatgttccttctcacagtagatgatatctttaagcttcagcgttaataataacgcaccacttcgaatcgttaaagtcggttcagcagattgctgtaacatacctaaccgtttttttacgacttgtaggactctttgtacttctggcacaaactttgccttatcgaacatatttgtttttgaaataaacccggttggtgttgtcatcgcactcaacgtatccgggatcatgtcatcacgcaccgtcacatagacaataaacccatcaggatcataatcacgaatcttagaggccaattgaatgccattgatttcgcgttgtaaaacgatatctaaaaaataaagatttggtccgccgccatcctttaccgccgctaacacatcggtcggctgccatactgagactaactcataattaaagtgcaatgcctccagctgtgccgtaatgatgtcgtttaaccagagacgctgttgttcttgatcgtcactgataaacaccttcatatcaatcactcttcccaatgtaaagcagattaacaaacaaaccactgttgatccactctatcccaatttaaattgcttacaatcattttatatgatactaaagccccgccattccagcaaccaaaaaaacacgtatggaccaaataactgacattacttggtccaccgcattcagcttatttttcaatttgttgtggcttggtctgtacttgattaagtcgcaataattcatccgtgcgcaatttattaacaatcagttgagccgctgcggttgttaaactgtgactgagatcctgatcagaaatcgtaattggatcatcgggatgatgaagttgattcgttaataccgtaataaaattgtcgtaagctcgcttgggatagccagtcgcagtcacttggtcgattccctgacgaattttatccagtggataactcggttttagtaagctaatgacaataatatccgccaattgcataatttgatatttcttcttgactggtgacaagatcactttatgtttgacataattattgatcattgcggcagtaactggatcagcacctaatggctgcaacgtttcattaattaataataggacctgatccatatataagtcaaagttcggtaactcgatccacttcggcagaatcacctttgccatgcgggcttgccaatctgcataagtctcattagctgccatgctgcgtcctcctctgataaataggttacattaattatacctagattaactagtcttgtaaactagatgacattgtaaatcacattaatttctgaatatggtatcatttatgggttaatgcaaatacaaatgaaaagtaggttatgtagtatgtatgaaatgaccaaaaagctccgtgtcggtgatgatgttaaagaattgattccacaagcagtgattgccggactttgggaccgtctcaaagcgatgcgcaaagagaaattattgattgatagcacgatggccatcatgttcagtgacgactacgaagacaataaaattttcttcatgacacttcaaaaatccggctcattcgccaatgaatatgaaatggcctatgatgggcccaaagacttcctcggccatgggacgattgttattatcaaagaccgtccccgtacgattcaaatgagcatctcggacgctaataaagctgaagacaccaatgacgatgcgactgatgagcaaaagtaggctcgcactttaaatcacatcatgattgctaataagctgctcaggtggtgaccgatgttcactgactaccccgcgctgaattggtacctggttatgctacagactttcagattcgtgctcactaggttgtcacgactgattgctagctctgtcaactagttgagacagcaccttgctaacagcacccctaagtgtgcaaaaaaatccgttgccatcaatgtgtatgtatcgaataaaagcaccgtcagaattcgctgacgatgcttttatttattgtatttctatcttaccttcgctatccgcaacggtttttggcaacgtcacggtcagcagtcctgcttgataatgcgcttgaatctcttcgcgcacgacattcgttagatgaaacttccgggtaaagtccgcgtccatccgttcgcgatggagtacgcgcccgtcatcgttacgatcgtcttgcgaccggtgcgcccgaatagttagccattcgtcagcatacttcaccgtaatagcgtccttatcaaaaccgggtaattctgccgttacggtgtaatcatcgtcatgttcaaccacgtccgttttcatcccaacgtgtgcgtttaagacgttctctgcttcccggtgagcccgcttcaataatttggtgggctttagtagatcatccagatgatgaccgaataattgctggcgcatgtcaataacctccgtatcaaatcaattattagtaagcctgttggtgaatggcttcagcaagtaaatctaaggcatggtcacgcgtgccaacttggtccatatcaaagatgatcgaatcaatgtcgccacccttgaaatcaaattgttcgaagtagatgtacgggtcttcgccttcaacttttaggaaagcggcttcaatcttttgatcaaaaccggccgcccaatccgcatcgtccatctgattgaaatctgcacgggtcacgtaaccacggtcacgaattaaatccatcgcttttttgacatcactatcttgataaaccaatttcttcgaatcctcatgaatcttagttttcgtttctactggcatcattaaagatctccctttacttggtatacccttagtttagcaccattcattggaaacgttaaccatctttctcgcaatcgcattatttgggcttaaagggttgccagtaggcccgctgactacgatagaccaattaattaaccgtcgcgggggctgacaaaacgggtgataagccttataatattagctacttcgcgttatacttaaagtaactaatattatgaaatgaggaatgtttctttggacagtggccagataattttaaatttagtcattattgtcattacgttcttcgtcgcggctttctttgtggcctgtgaatttgcactcgttcagacccgccctagcgctctcgaagaagaacaaaaaaaacgtgataaaccgtcaaaacggatcgcaacttctttgcacatggtccgcaaccttaacgagtatctttcaaccacccaagtgggggtctcgttagctggtatcattttaggttggattggtgaacaaacaactgaacactttgtgcttgatttcttatccctcttcaacctatccgtctcaaccgcggtattacgaggtattagtatcgtcattggggttttcctactgacctacttagaagtggtcttaaccgaaatcgtgcctaaaaatatcgcaatcgacatgccactcaaagtaatggcggtcattacgacaccattacggtggttccacgtgatgttctacccctttgtatggttgttgaatgtctcatcagctggcgtcgtcaaaatgttaggcattccagttgcgaatgaagataacgatgtttattcacaagccgaaattcttaacctatcacgaaatgccgtaactggcggtgagcttgaacgtaacgattacctttacatggagcgggcatttgagttcaatgacaagatcgctaaggatatcatgatcgaccgtactcagctagttgtgattgatatcaacgataccgtcaagcaagccattcgcgtttatttacagaaacgctttagccgcttacccgtcgtagctaacaatgataaggacaagattctgggttacgtttataactatgacttaattcgccaaggtgaagttgacgatgatattcgggtcaataagttattgcgtaatatcattacaattcctgaaactacaccgattcaagccattctccaaaagatgatcgacaaacaaacgccgatcgtcgtcgtggttgatgaatatggtgggaccagtgggatcgtcactgataaggatatttacgaagaacttttcggaaccgtcaatgacgaaatcgacaatgtttctaacgaatacatcgaaaagcaggccgatggcacttaccgcatcagtggtaagatgaccatctacgactttgaacgctacttcaagaccgacttacaagaatttgaagattccgatgttgtcactttgaccggttatattttggataattttcctaaaatccaagccggtgatacgattcaaatcggtaacttcaatttcaaagcgcttgattttgaaaatgcttatatcaattggtttgaggttagcgcccagacggatagcacacctgacgatcataatgacgatcaaacacaagactaaatatttacacgcactacttaaaatggcacttaaggaagttgatttcttaggggccatttttttgtatccggcgaacttcaactggtcaactttggtacttttatatgataagtcgtgtgaattgccactaacctgttgtacataaattggatgcggttgatttaagggaaagcctactaaaaattaagtttgtcttaagccggccgttatcacgacaaactgcgacgattcggagccgtagtcgtttgcaattaagtagtgcccagcgtaaactaaaactaatgtaaaacagaaatgaggaactgctgtgagtgaatcaacaatcaatatcatttatatctccattgaaggcaatacccgctcatttgtcaccggtatgcaggattacgccaagacccagcatgcagctgatgatagcaacccgttaattaccttaaaagaaatcaccgaacagtcagactttgccattgagactgaaccctacttcgcctttgtcccaacctaccttgacggtggtaacggcattgacaatggggttaaggaattgatgaccaacgtgttaggtgaatatcttaactacgatcaaaactcacggttctgtctcggagttgttggttctggtaaccgtaactttaacgatcagtactgtctaaccgctcggcgttatgctgaacaacttgacacggacatgattgcggattatgagcttcgcgggactgccgttgatactgaacgcgtctataacgtgatgaaagaccgtttggccgcctatttagacaatcaaaccttttaatcgaattaaccaaacaatcaaggtccaagttagttttcgctaacttggaccttgattgcgttcacagcacgaagttgaccaatcgcctcagtaacgacgatttcacgctattccgttgccttatccttatcaaatattgtggggccgatgactagtgattccgctaataaggtttcattgtacaatttaaaaacgtacttctgatacttgacctctcgttgtgaaatcatatccaaatattgccgttcttgttcgagtgcattcataaatgctcgcatctctaattctttttctgcaccagtaaattccggtcgccgaacaacgtcaacccaggcacgcgcaaaatcacgagtcctagtccgttgtttctgggtcatcaaatcaaaaatgacggattctttcacattcgacggcaaatacattttctgaactgtatcaatcgcgtggtgaaccatcgccacccgaatctgatcaatctcactagttgcctcatcatcagtcaacgccggctttagcaaccagcgaaaaataatcgtcggcacgaccatactcagaataatcaacgtactggcagccattagaaccaagttaaagtcaccacgtccgaccgcagtatcggttaacgtataggctaaggccagcgttaccgcaccgtgcacgccacctaacgcaaaaatccatgcgggccgatttttgaaactcaaccgcaaccgaccatagctgtaacgcaccagcacattgctaatatacagaacaagcccaatcaacaaaaagttcaaggacccatgcccgaattgttcgttaacaagaattttgataaacatgaatccaagaaccacaaacaccatgctattaaagatttcagtaatcatgctcaccaagtcaaaagcaaaatgaacttgttgtgcattaattaaccggcttcgttgggcttccgcattatgcactaatcccgcaaccacaaccgtaatgattccagaaacgtgaatcgcctcagcagcataatacaaaataaagggcgtaatcacgtacatcaacagcgacgcattcaacgaattatacgaagagcgtaacaatacttgccgaaacagaaccatgatccaggcactgacaaaaccaaagagtaccccacccacagctgaaataataaaatcaataatcgtttgcccatagttaatatagccattagcataccagagaaccgccatgttcaataagatgatgccagaagcatcattaaacaacgactccatttttaaaaaagttccctcagttgatggcatctccaaaccgttcgtcaccgattccattgccgtggcgtcggtcggcgtactgatagccgctagaataaaagctaacggcaagccgactaatcccagccctgccaagctaaatcccgcgacaattaaggcaagaatgactagtccaactgtcgtttggataatgtgctttaattccttaccaacggcattcagtcgagtggcttgtccttcaaaaaacaggagtggcgcaacaatcaggccaataaagatttcagaattgaagttttcaatatgattgctcaaaactggaataaaaaacaagccaataccgacgatcagactcaagtagttcacagatatttgcggcattacccgggaaataaaaatactaacaaccgcagccaacaccagaataaaactggaaaccatcaaattcacgtactcacctcattttattaattaattcatttattctatccgataatgctcaaattgtatcgtcaatcgtctccatcatcactttcaaagaatcaaaaaagctttcaaggcatttgaccttaaaagctttgttaatatcacggggcccacctgctccttaaccatttaataagtgttctcgccgggcgcgccacaagactaacgccaaactacctaacattaagatagtcaccgtaataaacaataacgagtaggagaactgagccaccatcatgccaccgaacaatggtcccacagctcgtcccaatgacaaagccatgttgtatcggccttgatattttccgcgctgatcatcagccgccatatcatcgacccaggcgggtgcaatcggtaagccaatgacctcaccgatcgttaaaaccaccatgataaaaataaaatcaacgtattgccgggcaaatactaatcccaagaatgataaggcaaatagcgtaatgcccaagccaatctgagtgccaatcttaaatcgttcgttgaataacgccacgatcggctgactcacaataattaatagcccgttaatcgtccaaacttcactataccggcggaacggaatccccaagttggtcatgtgcacggaaagaatactttcccataaggcataactcagataaatggtgaaaatcatcaaacaaatcatccagattaattgacggtgatttttaggcgtcacatcccgcttctgtggcgcagctttctctgtccgaacagtcggtgtgacgttaaaggtacttagcgtaatcgtcataagaccaaggtagcaaactgttgccaccatgaacaccacattgatacctagttccaacaagtaaccgaccaataatgtcccaataacgaccccaacgttgagtgctaaataaagcatgttaaaaacataccggttggatctagtcgttaccgttgcggcataggcattgacgactgtcatgctgataccatcaccaaagccgacaatgatcaagccaatcgcgtaaggccacaaactatgccagaaaatcaacgttgttaaaattgcggtcgaaataccaccaccaagtagcgctgtataatatggtcgccagtgatcaaacaagcgcccgccaataaagttaccagcaatcatagccaacgacatcaaaaaaagaataattcccgaaaacgtcaagctttgtttgagataattatgcatgtagaccgttgttaatggccacataaaagcggcacccgcattattcagcaaattggctagaaacagccaccgtaaccgaacttctttttgcatctcctcaccacatttctgatttaagtttattcattgagaaaacaataccctaaatagtatacgccgcctgaccgtttttacctaccaatcaggtcgcaaaaggtgctgagtagtctacgaaatcatttttacttaagccgcgcttagcatcaagtcttacactgcatgttgtttacaatcgcaacgctgtagtcgcagcctaggcccgtgctttgaccatttggtgcattctaaatgcggcccccactccgcggatccgtttcatccgttttagtattgttccgagaagcactgaccacgtgtatactaaagtcaaaaaggagcaattgacatgagacttttcaccattccagccgaacaaacggcatttagtaccaaagaggttgtcgtcatcaccggtatgaccaaggacgccctccgttattatgaacaacaacagttgattgggtccgtaccacgcaaccacaacaactaccgacagtattcacgtcaaaatttagagcgtctacaattcgttgccacttttcggcaattaggccttgatctaaaactactcagcggtgacggccacattccaaaccgggcccagcgaatccaagaactgagctcatatcgtgctactgtgaaaaagcaaatcgctcaattacaggcaactgatcagtttttagcacataagattgcttactttgaagcttctccaaatcattaaccaacttttttactttttacttgctatcgtgtggacaccatagtttatactaacggcacacttaatcaaagaaggttacgatattatgaaaacaattgctattaaccaatacggttccgcagatgaatttacgatggtcgacatgcccacgaccgaaccacaagctgatgaagttcaagttgcgattcacgcctttagtctcaatcccatggatattgctggccggatgggagccctatcctcaccctttactgacttatgggcctttccattggtcttaggttgggatttcgctggtgtcattaccaaaatgggcaaggccatcactggttttaacatcggtgacgctgtgtttggttccgccgcgcctgcccacgcagctaataacggcacttatggtgaatttattactgttaatactaaagaattagcccatctcccagcaggcttatcatttgatcaagctgctgctttgccaatcgctggactaaccgcttattacggcatgaagcacaatcttaagctgcaatccggacagaagattctggtgcagggtggagctggtggtgttggcctctttgcaattcaaattgctaaagcctttggcgcttacgtcgcgaccaccgctagtgctaatcaccgtgacttgttaactcgcctaggggccgatgaagtcattgattaccacgaaaccgatcctgccgccgtcttgcacgactatgatgccgtttttgacaccgttggtgatattgatactggtctcaaggtcctaaaagctgacggccagctcgcaaccattgccggccaaccgacggacgagcagcaacatgatcaacagaaaaaagttgcctttcagttcacccaaggctcatcacaagacctagccgacttagcccaattagttgtcagcggtcaagtgaagctaaccgttgcgacattaccgttctccgtagccaatgtcattaagggtcatcgatccatcgaaagtcgccatacgacgggtaaaatcgtcattcacgtgacggattaaccaatcctgctactcgataaatatcttccggcaccattcttagtagctagtcccactgtaaaaatgaacgttcagagttcgaaggacttctgaacgttcatttttattttagcggcccaattagccatggcacacttggtagcaaaccaaccaatttaatttaatgaatcactttaaacttcgcagcacacttaacaaccagttataattcacgatgccatgatgaatttggactaagttcaaactgtctcaaccaggtcgtactaatattaattcgacaatccataaaaattaatattgaaatgtccggtttttgaacctgattgtcgactaccacccctgatgattgttataatataattaaacactgccaaccggtgtaatctttcaacaattgaggtgacaacatggcgaataacaactttggcttggcgttaggcttcctagtgattctgttgctctggatctatcaacgcgtgcgaatgcctaagatgcgctcactcgctggctacatgtcgcgacgcgcgattgaaaatgaggaaacatggcggttcgcacaacgcttctattcaatgtttggcatcgaaatcttttccattttgttaatcggcgcgattattggtggtctgttcaagattccgctattgcaaagctttaattttcaagccatcgccttagcggttggtttgatcatgcaaaacgttgcaactgagcgtgaactgaaacaccagttcccaaaatctccgcaacattagtactttataattgaccatcaccacgtatggtttaatattaatacggtagtttaatctgaattaatgcttatgaacaagtacttggtttaaaatattcttagtaaagaagtgaaattgatgagtaacgaaaaaattgccttattcaccatctttggcggtactggtgacctcgcacagcgtaaactgtacccgtcactatttaagctctatcaaaagggctatctcaaggaccactttgccgttattgggacggctcggcgtccttggactgatgatcactatcatgaagttattagtgactccctagctgatctgaatgctgatcaggaaacggtgacgcaatttgcgagccatttttattatcaatcgcatgacgttactgatgctgaacattaccgaactttgaaaaaattatcagaaaagctggacgcccaatatggtttacaaggcaaccggatcttctacttagcaatggcaccaaacttcttcggtacgattgcccaacacttacgttccgaaaatattctgacagataacggttttaaccgcgtcattatcgaaaagccttttggtcatgattatgaaagtgccaaggaacttaacgaccaattaacggctacttttaacgaaaatcagatttatcgaattgaccactaccttggtaaagaaatgattcaaaatatcacggccattcgttttggcaataatatttgggaatcattatggaacaaccgttacatcgacaatgtccaaattacgttaagtgaaaaactgggtgtcgaagaacgggccgtttactatgataacagcggtgccttgcgggatatggtccaaaatcacattttgcaaattttgagtctgttaacaatggatcaaccagttgaattcactgaaaatgatatcgacgtggaaaaggtcaaggctttacggagcttacgaccacttaaaccagaagaagtcgcaaccaactttgtccgtggtcaatacggtgccggcgatgatgctaaagcttaccgcgacgaagataagatttcatcagattctaacaccgatactttcgtcgctggtaaagtcatgatcgataattatcggtggtccggagtgccgttttacatccggactgggaaacgcttagccgataagttcacgcgaatcgacgtggtgttcaaacggccagtcgtcaatatcttcaatcatgaagacgtccgagctaatgacgacgcagcaaccagtctcgatccaaacatcttgacaatcaacgttgaaccgactgaaggcttcgagctccgcatgaatgctaaagcaatcggccaaggcttcgcaaccaccccggtcaagttgaattattctcacgatgctgaagccacggctggtagcccagaagcttacgaacgtttgcttcacgatgccttaaatggcgacgcaaccaactttacccactggcaagaggttgccgattcgtggaaattcgttgacgtcattcaaaaatactgggatgaacatcaacccgaatttccaaactaccgccctggtacaatgggaccagatgcggccgatgaattattacgtcaagatggtcaccgctgggtctaccgcaactagccgtcctagcgtattcacttaaatggcttaattaaaagaaccagttaccaacacttgcctaacaacgtgttgataactggtcctttttatatcgctttaacaattggatgggttgctgcccatcggcaatacacgtttattttgctcttcgggattgcgcctgcggattagcttaactagcgtcgcaataatccctaacaccacccattccgcttataaacgcctaccctaccagttgttcacaaacttgaatcaaccgtttgacaccggtcgtcaactctgacagtgtcagcccggcaaaccctaacaagtaatagtccgccgtgggcatgtcgcgccaattggagttaagcggataaatccgaacctgttgccgttctagggcttctaataatttagcctgtgcaatgcctggaatctgaacaactaagtgtacccccgcgccggttgcaattggtcggatctgcttagtttgcgctaactggtgacaaagtacccgatacttttgtcgattagcagctcggtttcgactaaggtgccgataatacgccccatcttcaaaataattagccattgcttgttgtaacaggccggccaccatttcagcccgatattgataccgttgatgataagttgccaccagttgtggtggtaagaccaaatatcccatccgtaatgtcggatcaattccccgcgaaaatgtccccaaataagccacctgattagccgttgctagcgactgtagcgcgggtaatgggtgcgcactgtatcggtattcactatcataatcatcctcaatgatgagatgctgagtccccgcccattgtaacaacgctaatcgtttctcgatgggcaagacgactcctaatggaaattgatggccaggggtcgtataaatgatctgaggattacgcgcacgaacttgtgtcaaatcgagcccatcttccgtcactctgatggggtccgccgtctgtccataactagccgccaattcggataaaccgcggtagcctggattctcaattccgaccgttccgcgtggcaagatactaagtagaatactgagacctgccttagccccactcgtgatgacaatctggtccgctgtgcaccgcacaccacgagtcgttttcaaaaatcgaaccaagttttcacgtaaagccggtaagccctgcgcatccggataaacggccgttggttgctgctcagtctgacgcaacgctagtcggacagcccgtttccaagcgttccaacttggcgataacaactgagtcacaccataccgaaaatcataagtgaacgccctgggtttagtgggctgtggcacagtctccagcgcctgtttagctgctggccagtgtgtccgatcgcgataaaagtagccactcccgggaacggtataaacatagccctctgctagcaactgatcgtaagcttgttcgacagtggtcttggaaactcccaaattttgtgccattttacgaattgaccataactggtggttggcttgagtagcatcatagtcatcacgcatctgctggtataactgaatatataacggtgtcgttgactgacgatttaatggcatcacacaactgtcctttcatttttatcaaaattgtctatttctaaccggacgattgttgtttattataaacggtaatcacgttgagaggaaggtcctaatgatgaatacaaatattcggatccaacaaattcaagtctctggcatccgacgcttcgatgaagcaatcagtcaaattcccgatattatcagattaacggtcggcgaacctgacttacccaccccaagtcacgtaaaaaaagcggcaattcaagctattcataatgattggacacactactcgccactaatgggatttgccgctttgcaagatgctgcgagtcactactttcaacagaaataccaactcacctatgcacctgagcaaatcattgcaacagtcggcgctagtgaagccgttgcaacgaccctgctcactttacttaatcctggcgataccgtcttattgccaacaccggcttacacgagctatcaacccgtcgttgacatcgcaaacgcaaaattagctcccattgacacaaccgcaacgggttataaattaacacccagtgcgttacaagctgcgctagatgatcaccgtcgcgaccacgtcaaggccttaattttaaactacccgaccaaccccaccggcgtcacgtacactgatgatgaattacgggctttgcaagccgtcattgctaccgctggaatctacgttattagcgatgagatttacagtgaactaacctatgaacagccccatactgcttttgccacactatatccaagcaaaacgatcacaatcaatggcctctccaaatcgcatgccatgactggttggcgactgggattcatcatggccccaagtaacttgattaccgagatgaagaagacccaccagtacctcgttacttcaacgagttcaatcacccaagcggctggtatcgaagcacttacccatggtctggatgatggctcagaaatgcgtgacgtctatcaaacacgccgcgattacgtcgtcaaacgtctgagtgaaattggattcaattatatttatccgacgggcgcattctatatctttgtccagctaccacaggatttccaaggcaccagctgggactttgcgacccgactcgcacacgaggcccaagttgctgtcgttcctggctcagcatttggtacgagtggcgagggttggttccggataagttatgcagccagtcaatcggcactacgcgaagggctaaatcgtttagccttatggcgcgcccaaactaccacacaggaggattagccacatgaatttagcatccgcacacctgattaccgccatggtcaccccatttgatgaccaacaacacattgatttccaccgcttagagcaactgatcgaacacttacttgcaactggcacggacggcttattagtcgggggcacgactggcgaaggccccacgttgagcatcgctgagaaacgagatttatacacgcagacagctaggatcgttgctgggcgagttccaatcatcgctaatacggggaccaatgacactgccgccacaattcatttcacccacattgtcagtcaaatcgagggcatcgacgccgccctcgtcgttgtcccgccttataacaaacccaaccaaaccgggatgatggcgcattttacagccattgccgaaaaatcagacttgcccattataatttataatattcccggtcgcgtaggcgttaagatgacggtcacgacgattctcacgttggcccacaaccccaacattattgggatcaaacaatgtggttccgatgaagaactggccgcaattgttgaaaaggcgcctaaagattttctcgtttacacgggcgaagatgctcagagcttgaccaccctcgtcttgggtggtcagggaacgatttcagtggcgagtcatttatttggaaatgaaatggcgacgatgcgccgcgccttgaaccacggcgatatcacccaagcagggcaaattcaacgacgtttaatgccgaagatggcagcactattcacacaaccctcaccggcacccgtcaaagcggcgctgaacgcccaacactggttagtcggaagcacgcgcctaccaattttaccgttaaccaccaatgaacaaagtcaactactcaacagcttaaaataatgcagaacggttggtagtacctggcaaaagcgcgtatactgaacctaaaataattaggaaagtggtgaccatgatgtgcggttgggcttttactggcggtatgccctttatgtggatgggtggcggcttgggcattatcagcttactgattctgttagccgttggtgcttactttttagggacacgttcacgccatcacgattaaagttctcattgggataatcaaaaaagactttcaaggcacggcttgaaagtcttttttgtttcatcatcagggatcagacaaccgggtcaacccctccccatttcaggtgacctgcagttttgcctgatagtatcagtccaaacgctgatttagacccaatgacttaatttcaagatcgtaacgtaagtaagtttaccagccttaacatttctattgagtttgtccccactaacttcattttcactcacaatccataagccgatttgaacaaactggccgccagtcccaatgccccgattccaatcacaattttaagtaatctggcaggtaagtggcgtacaattcgtggtcctaagctaccaccaatcagaaacccaatgcctaagggtaatacatagcgccactgaattggcgtttgcaagccataaacgacggctgaaacaatattggctaatcccaacgccagatttttctgagcattatagacgacgaatggtgcggcactcgtgaaagacaggatcgacaacatcaagacaccacccgcagcaccaaaataccccgtataagccccgactaaaaagatgcccaaccaagctaaagccgtcatccatttaggtgtcacaacaatttcaccgggctgtttaatatgaatatgacgaggaatcagtactaaaattcccgcaatcaaaataaaaaatgggacgaccttcgcaaaggtcgctgccgggataataaataacagaattgccccaacaatactcccaactaaagtcagtgggatgagcgtcttcaattcctgaccatgcccccgtagttcccggcgtgaggctggcacggctccaaagctagtaaagactaagcccacggtgttagtgacattagccgtaacgggcggcagtcccagcgccagtaggaccgggtacgaaaccagcgacgctaaccccgctgcagtgctaacgatacccgcaacaatcccaacaacgactaaaataacgattaactctccgaacgtaaacatgtgcaacgttcccttctctcttaatagccctacaatagccacaacgattaccatagtcaaataaccatgttataataacaaatcataatactaacaattaagcattaattaaataaggactttaagatgaatattaaagatttgcaatattatgtttcgttaactcagctgaaaaatttttcattagttgcagcccaatttcacgttagtcaaccgaccatttcggctgctattcggcgcttggagaccgaactgaaaacacaattactaattcgggctaatccccacttacccgtggcactcaccacgaccgggattcaagtccaacgacacgccaatcagatcctattagagcaccaactgatgtgccaagaagttgcccacaccacaaccgatcaacttgtcatcgggatgccgccaatcattgaaatcaactactttccccggattgcaagccaattaccacaagctttattcagccagattcaacctatcagtcaaggttcactcgcggcgctcaaaggattaaaaaacggacaattagacttagccgtacttgcttacctcaatgaattcacggatacgaccattcaactcacgacgtttgacacccagtcatttagtattgttgtaccaactgacgatccgctagcaaccaactcacaacttcagttcagatcgttgcgtcatcagcattttgtggcgctcaaagataactttgtccaccgccaggcgtttcgtcaactcagtcatcaaaatcatgttcggccaacgattgtctttgaatccaatgaaatcggcagtatcttaaacatggttcgtcagcatgtgggcattgccttattgagtaacgccgtccaattaccggcgggattacagcggctccccctaactgacgcgcaagcgcccacgttcaatgtcggcgttgcgtaccgccactcaatgacgtttagtccaacccaagccgacctgatccaacgactgaccgctgcttttcaatccgtcgattggcacgcatactaaccagcacctaaaaatccaccgtgtaagtttatcaatatgataagctcacacggtggattttataacgactgtacgtcaagttaggtcgccaaatgcaggtcattaaacagacaagttttagtaacctatcatggtcgctaacccgtctcaacctcagattaagcttgttgaacagccttcgagattggggtatcgccattgatcaacgcaatggttttaccgaccgttgcaggggtgtgtagcgtttgaactgtaaaagttgcgacatcatcacgcgtaatctcaccgccaacgtcagggttaacggttactttgccagtaccggcatcattgatcagcgtacctggttgtaaaatggtgtaatccaattgggttctgttttttaaccattcgtcagcataatactttgccacgtagtacggttgtaatgctcgtggccaacgactccgatccggtgtaaattcagcactaataattacgtagcgtttaacgccggcaattttggctgcgaccattgatttgacagccccatccaagtcaatcattaaagtcatatcataacccgtttgaccacctgatccggctgcaaaaacaatggcatccataccattaaaagccaacgctaaatcttcaggctgagccatcaaattgaattgtactggctgcgcaccagcatcctcgaaagcctcagcctgttctggttggcgaatacccgcgtacacttggtcaccttgggcaactaacttggaaacgattttcttaccaatctgcccatgggcaccaatcacaaagattttcatctgggtcactcctgtcctttagttaagtttcattataaagcttaccaggacaaaaaagtatcattctgttcctgatttgtccagtttacaaaattggcttataatatgagcatctaaacgagagtagtgataattcatgtcaaaatatattcgtcaagctactagtgctgacttaccagccatgatggctattatcgaacagggcaaacacgccttggctgccgatcagattccccaatggcaagatggttacccgttagctgctgatattcaggctgacattgatgctagaattgcctgggtactcattgtcgatgatcagattgctgggacggctgcactgctaacaacacctgaccccaattacgctattatttatgatggcagctgggcgcctactgagaaccaccgctatgcctcgattcaccgtattgctattgccaatggttaccacggacaacatctgactgacttttactttagcaatctcattaccatgagttaccaactcggctttcgtcaactccgaattgatacgcacttgttaaacaagcgaatgcaacacattattaccaaagctggcttcgaataccgtggtatcgtctacatgaatcatgacaacaacgatcaacggaatgcttatcagttactactatcctaatatttgtcagccacgcggcatttggctttaaacatcacgaacgctttaattaagaccaaactcaacaaaaagcacgccagattattctgacgtgctttttccaactttgtaagcaccacctgacagccaaacttaattaactggcacaaacacctgttgtggcagtgagtacaaatactgtttagtcacctttcctggatacatcgacgctagcgctgctgcatatagtttaacttgaccagcgtagcgcgtcttcaattcttcaggccgcttgacgtggtccgtcttataatcaaacaaggttaacccatcagccgtttctaaatagccgtcaataattccatgaatcaggacttttcccgtctcatgttcatcaacatcgaaaatctgacgtgctggaatcagtaacgagaatggcacttcgcggtgcaccttcgccggattatccaaaatttgactgcccagcgcactctggtaaaaagccacgatggtgtcaactgcaatcaatttcgcgacattggtcgttaagacccggttagccactaacccatcaatcgtactttgaaccgtcgtttcattgaccggtttggtcaaatcaagttgttctaaaactaagtgggtcgcactcccaacttccgcactggttggcgcctgcatagtttgtaaaaattgtggtaactccagtgaccctgtcacaaaccgggatgtcggtcgtgaacgccgctgactaacagtcgggttcgcattcatcagcggagtatccggatcttcaaagattcgtttcacttctgataccgattgatatgccgtcgtcgtcgtggaagcctggtgtggataatgaaaattcagtaacgtggtcagataatcacgcgttacttgatcaacatcgatggtgacttgctgttcaactagttcaagcgcatcaggttgagtacccgataccgcttcactttgctccgccaggacggtggtggcatctcccaattcaacggctagcttggtcggatcatccgtcaattcgtaattgggccattcatctccccaatatgccttcatggccggatgccgtatcacggccataccgacccaatctaattgattagtcgccgcaatccgtgcttgggcacttaagacgcgcccgtcgctagcaaaggcctgccgccatttttcggtcgcggtatcaatatccttgattgttccaaccaaatagagctgttgctgagctcgcgtcatcgcgacatatagtttccgcatctcttcagcgcgcatcttcttgctgactacctgcttagtcacaacttgtggcaaggtcgggtacttcacacgcgtttctgggtccaaataagtaatcccaatccccgcttctcggtccaatagcgcgcttgagcgcgtatcagtctgattgaactgcttatccatatccatcacaaaaatcacggggtattcaagccccttgctaccatgaatcgtcattacgttgaccgcttccgcatcagtctcggccacggcagctgccaagtcctgatccttttcctgcatccggcgaataaaacgaacgaactgaaataagcccttaaaactgccctgttcatacgtataagcacgttcatataaagcgtggagattagcctgacgctgtttaccagccggcatgccgccaacgtagtctaaaaagccagttcgttcatagatttgccaaatcagggttacgatttgattacgtcgtgccagatctcgaaattcagtcaattgtgtcaagaaggtctcgatcttagcataaacttgatcaccatattcagtcgccggaccagtcggataatgatgataaaagtcctggacggtttgaaaataatcactcgttttattctggatacgcaaataaactaattgattttcgtctaatccgacaattggcgagcgtagaaccgccactaacggaatatcttgatatggattatcgataatactgagtagtgccatcatgattcgaatctcagtggtttgaaaataattctgggcatcattgaccacaacgggaatgtgataccgtttgaaaacatcaataattgttaaattatgattacgtgttggtactagtaacgccacgtcgctgtatcgaaacggccggtattccccattagcacgttcatagattggcttatcttgggccttaagtgccaaaatcttttgggcgaccatcgtgatactcccaacggcaggatcatcaattgaaaaattggtttcatccgtggagacatcttctgtcgacttgtcagtttccgtctggtaaagtaatagattcgtcgtttgtggcatatcggccggataatccttgggcccatacttgaggtaagccgcttcatcataatcaatttgcccgaccggcgcgtccatcagctgactaaagattaggttagtcaaatgatcgacattcgccaccgaccggaagttttcagctaatacgattcgttccccgtgttcgggattcgtcccaaaatcgtgatacttgtgcaaaaacaataacggatcagctaatcggaactggtaaatcgactgtttgacgtctcccaccatgaacatatttcctggctggtcgcgcgccaacagctgcaaaatactttcttgcaaagagttaatatcttgatattcatcaaccataacttcttcaaattgggcccgtaactgcgccaaagctgcctgactactttcattgtcactcgttaagatttgcaacgttaggtgttccaaatccgaaaagtccaggacgtgtcgccgccgtttttcagctgcaaaagccgtcttaaactgcttggtcgcatccactagctcagtcacaattgactttgcccctaccataatatctaagacttgctgctcatcggccgcaaaataggtctcgctaagggtggtcatttgtttcttgacaccgtccacaaatgtgcccatagttttggcccgcgcagtcttctccggctcgtccttataagtttttttgagagctccaatcttgaaagtagcgacttgagtacgtaactcattccaacttgccgttgccaattgttcacggagcgtcgtcagcgttttttgtgctgtagcgagtacctcaagcgttttcgggactaagtcagcatccgtcgcaactttttgtgcctgtcgtaatttcatttgcatcccatcgacttcattaatgagcaatggtaataattgttgttgataaaaggcactggccgttaacgcttcctcatccacctgataaggttccggtaacttgctcagccagccttccggatccggggtcgactgggcaaaatcaaataaccgaaaaatcaatcgactgagaccatcatcacttcgatcattagaaaaattcgctgttaataagtcaaataacgtaccatcttcatcatataattgttcacgaacactgtcccaaacctgatcacgaatgagtaacccctcagtgttgtccgtcaataggcgaaaaacaggatccaaatcaataacgtagtaataacgctgaatcacgcggagacaaaaagcatccaacgtactaatgttggctaccccgagcaaatttaattgctgccgtaattgccgaatcgctggtgacgccgtggtttgcgccggattgtccgtcattaactgtgagattcgcttattgatttgcgattccagcttttgtttcatatgcttggcagctaagtttgtaaacgtcaccacgagtaactggtcaatattcgtgccggccaatatcttgcgcataatacgttcgatcaatacggtcgtctttccagaaccagccgaagctgaaactaacaagttatttccctgctgtgcgataacagcttgctggctaggtgtatagtttgtaccctcactcatggttttctccacctttctgtgtcttcagtaaatcaagaacctgtttggctgataatggcggtagatcccgataagcattttctgccaacattgcatcaaactgcataattgatagatacggcgaatattgtaaagcagtcgtcttatcgttcagccgaattggatttagttgaatttctccagcgaaaatcgcttcagcagctgcaataatcaattgactattatgctgtaataatcgttctaactggtcattcgtcaccagtgaagctgcacgccccccactatacgacccatcctttttacgtgcgaatgggtaaactttcgaggtcccgttaccttgttgtagttcgctatctaaatgttccaataactgcggatcatcgagcaaaattcccttatacttgttcttctttaggagtgctgcttcaaaaccgccctgaatatcttttggtttcagagttggattttgaatgtgcatgtaaagtgcgccagctaatttaaccgcagcttgatcagaaccgactaaagcttgctcgttatgcagcacagcgtccaaataagttaacatttgcattgcgagaccatagtaagcctcttgaaaatcaaatttatgttgggatgacttataatcgacgattcccaggtaactttgatctgccacttgaatttggtcgagacggtcaatcttcccccgcacgtgcacactatgcgttgcatcaatttgaaaatcgagcgcttttaatccgtgttccttgccaacgttaccaaataagacctcggtttgcttcggttcagcggctgacagtttactttgattgcgaatcgcaaatgcaatctgccggactgtgttgattaactgccgttgcaagtaagccatccggttagaactcgtcaaaattgtaaactgtggttgatctaagatttgacgggtcacagtctctaaatactgtcctaactgctgatcactggcttgggccaatgggatttgatcagaccgtaacgccttgatgagcccatctaagacagcgtggaaaaactccccagtactagcagctgataactcgaacacatcacgctcacgcagtttgagcccatatttcaagaaataagcgtactgattacgataaaattcttctagttttgaaattgacgtataaatttgatgcccatacaaagcctcaacgctggctggtgtcagcttgacaggttgattgcgatagcttaatccagccatcaattgacgtgctagctcaccgaattggggatcacgcgtcaattgttgccgtaaccacacccacaccggagcaggttgtaatggtgcgccaacacgattacggtcagtattcgtcgttaacacatcgcggtaaacctgaatcacatgactaatcgtccggcgcttagtcccaacaaatggccgcgcatcggcattagtcggatcaggcgtcccaagataagtatgttctcgcaaattgaactggcgttgaattcgccgcacatagttggaccaatttaaatctgtttcttgatcatcttttaacggggcgctgaaaaacaagtgtcgacgggcacttaaaaaggccaaataattcagacaactttcatcaccgagctgaacgacagctgaatcatttaaatagtggtcaccatctaacgaactgagcgttggttgcaaattttctttatccacatcactcaataagttgttcgtcataatccggtcaggcatcactaaatcggttgccccaaccatgaagacaactttatggtcctgactttgaaccattccgctctctgaaattaacacctggtccaacgtcgacggaatttgcgagtaactagcaccttcaaagcccgcttgtaatagtgccaaaaagtccgtaatttcaaatggctctgcacctaaaatcgtcacgtattcatctagcatcccacagaaagtttgccaggtctgctcaggctcggcagctgcccggacatcttggcgatccaaggcttgatcacgccaagctaatagctggtccgtaacgccctggcttgtcaaaaagttgaccagcaatgtcacggccgctttgccatccggtgcttgccgcatttttttaaaaaacggtggtaacgtttcagcaacaaagtgatgaatcaagttgatttgtcgcgaaatttcagcattttggtccgtctcgaccccggcatcaccctcggttaattgaaagtattgccaatcttccctttgtacccaccgctggccgtgataaccacttttaaggataaagttttcggtcagatctactgcttggcggtaggcttgccgatccatcggttgcccattgatatttggcatcaacagctcggttttcaacactcgcataacatcacgatattgatactgctgtgcgtcgatatcaaacaacgcgttaatcaactcaactaacggatggtcggccattgaacgctgtaaatcaacaaagtatggtatttctaattcatgaaaagtcggcgctaacatcgtttggtaggcatctaagtgccgtgtcatgatcaagaagtcccgataatgataatcgtcggcgggatcggcatgttttttcgcgaccattgcccgaatcatgcggccaacttgtgccaattcggtctgtcgactatcggtccggaataaatgcacattcgtattcggctcctcgtaaccggtagccgcttggggctgaccacgccaaaaatcatcgagagccactaagccgggagccacgcgcggcgtttcagcataaatatcttggctaaccggaatctgacgaatacgggcatactgataaagccgataataaagccgaccagattgataaaacagcgtgccattttctggcgcccggtcaacgactttgtgatcgagcatcaaactgattgtcacgtccgcgccctgttccagcatagtcgtgacgattccctgttcctgggccggtaattgggcaaagccagcgagttccacataaacgtgcgttccgtgcaagtcttgacgccgtaagtaagcattcaattgaacgagaatatcagcgggcttaagatacttatctgcagtcgccgccacgaagtctttgtaaacgatcgccagatcatgtagcttagcctgcaagtcacccgcctgagcattcgctgccaattgaaccacatcttctggttgcaaattagcggtctgtaactcattaatttcacgagctagttgagtcacaaaacccgtttgcgagatttcaccaccaaacaatcgcagctcatcggcatgtcgttgtagaatgcgatataatagcatgtcaatcccagcagcggagagtcgtggtacttgataagctgcttcgttcttcatcaagtaccaagcaagacgggtaaatgaaaagacctgaacctgagtctgggcatacaaatctggttgcccaaatgcctgtgccaagcggttcaacacgtcaacttcagtatcgaacttaatatggttcggtaccaaataaaaaaactgatcttgtggcttagccatcaaggttgccactaactgcgccaccatagtacggcgatggtccatcttggctggtcccaatacaaattgtaagctcaccactaattcctcctctgaactgaacaaacgttctcattaagttagtctcattatcgcatatttaaccggctaaaaaaacacctaacccgtaagttagatgtttattatcgcgtccattaaataccacgttattcagccaggcgacccgtgtgctgcacgtcttaattctcaacgttgacggccactgctgccagatgtgcgtcggatttataatggcttatcgtgcccggcatccagtaccgttttgtcatcctgatttgaaattttagaagctttaacgaacgtggtcacggcttaatgtggtcaactcgcacggtcgcttattcatccggctgcaagtctcgacctcaaaacaccttaccgatcacccggtgacactcgccaatcctcagagtgcttaaaagacgcgaattagcacaacccccacaatcatgacgagcaagcccatcaactggacccccgaaattgggttcttttttgaagcaaaccagccaaattggtcaatcattaaactaccggccatcagtccgactaaaacaatgacgaccgctaaaccagtgccaacgaccggaaccaagtaaacattacccaaaacatacagcgcgccaatcatgccaccaatccacacccaccaaggattaggcgtcttagttggcctaatcaatttgaattgaggtcgcaagactaacacgatgacgatcagccccagagtaccaactaaaaaagaaacaaatgccgcgtgcactgtggagccaagcacccgacctaggtgcccattgaccgcagtttgcatcgcactgagcattccggcaaccacacctagtgcacgccaaattccaaggccactttggtcagtgtcagtagctgtatctttttccgctgtttcagtgattcgattatgccgctgttcgagccacccctgagccgcaacggtgatgatgactcccgccaagactaaaattgcacccaaaaatcgggtcatcgtcaatgtactttggggtgagtcgaaccaaccaaaattatcaatcaatagcccggccaaaatttgaccaagcacgggcataataacggtttgaacactacccagcttcggaaacaacaagatattgccagttaagtagacgacccccaacagcccacccagccaaatccaaaccggttgactcgtaaataacgtcgtcgaaaatcctaaagtatggacatcaattagtgtcattatcgccaaaaacaacgtccccacagcaaaagatattagggaggcaccaaatggagatcccactgaattgcgcaatcgcgaattaatactcgtttgcattggtaacccaatcccgattgctaagccaactaaaattgctaacatcgaatattccctcatttctttatcttgtcttaacaatctgtcacaggttaatattagcacgagccggtaactaaaatagtcatgaaaatcgtctggataatccagcttaattttcatgactattttaaatatgccagccatttatggcgcgtaatcctaatcagtcactccccagtgttctgggtcctgacgccacgtatgcagcgaagctaattcctcgtcatcaatgtaatctgcttggcgagcaactttgattagttcaggatagttggacaaactgaacagcggtaatgacacagcggcaaaattttgcgttgccgcatccaaggcataactgaagattgccccaacagcctgaatatcgccacctgctgcttgaacagccttggccgcctgtaacacactgccacccgtcgaaatcagatcatccagcatgacaactttttgaccgggctttaacactccttcgatttggcgtccagcaccgtgatccttgggtttagcacgaacgtagatcaatggtagatttaacaattccgccacccaggctgcatggggaatgccagccgttgcgacccccgcaatcacttcggtcgccgggtattcacgcttgatgatggcggcgattccgtgcgcgatatgctgacggaccgccggataagaaatcgtcagccgattgtccgtataaattggacttttaatgccactggcccaggtgaacgggtcgtttggtcgtagtgtaacggctttaatcgtcaacaaatcagtggcgatagttgctgcaatttcactcatattagttactccattctgtcataatatctcggtaagcttgaactggttctgcagcctgcgtaattggccgcccgatgacgagaccgttgctcccagccttagcagcggcagccggtgtcatcacccgttgctggtcatctgactgcgccgacgctggccgaattcccggcgtaattccgagaaaatcagcaccgacggccgtatgaatcgcctgaacttcttgggcggaacaaatgacgccatcacagtcactcgcccgtgctagtttggcataatgcacgacactcgcccgaaccgttcccatgatttgctggtcctgattcaaaatagcttgattagtcgaagttaactgcgtaatcgctaataacttgggggcagtgactccagcggccattgcacccgcgaccaatcctcgtttggcggctgaaagcatcacgtgcccacccgcagcatgaaccgtcgtataggttacccctaaccgcccgatcacccgcattgcggattcgacggtattgggaatatcatgtagtttcaaatctaagaaaaccgcatggccgcgagcttgcacgtccgtcacaatactcggtcccgctgcataaaataactccatgccgattttgacagtgacatgtaaatcagccggaaattggtctaaaaaagctaaggcccgttcggcggtgggaaaatctaacgcaatgataattggtcgcttcatccttggacctcctgaatcaacgcttgcaagctggtgatcccgtactgatccattgccgccggtaatcctgcaataatgtctgtacaagcagtcgggtgaccatacgttgcggccccaacttgaacagcatttgcaccagccaggtaaaattccaacacatcaaccggcgtgaacacgccaccaacgccaataatcggcaacttggtatgttgacgcacgtcatggatcatccgaacagcaagtggatgaatggcttttccagataaaccgcccgtaccatgcgctaagatcggttgacgtgtggctaaatcgatgcccatacccgttaacgtgttaatcatcgtcagtccagccgctccaccagcttcggcagcgagtgcaattgggacaatatcagtgacattcggggtcagcttcatgaaaactggtttatcgaccgcggcaacaatcgccttagtcaacgccgttaccgtcgctggatcagttccaaatgctaggccgccatggtcgacgtttggacatgaaatattgatttccaataatttgacgttaggtgccgacgccatttttcgtgcgactgccacgtattcatcaaagctcgcccccgcgacactcccaataatcggtaaatccggataatgagtcgctaaccacggtaatttatcggccagcacattgtcaattccgggatttttgagtccaattgcattgagccaccccgcggttgtttccgcggtcgttggtcgtgggttgcccgctttcggttcggcggtggtcgacttgatgaccaagccccccaacgcactcaggtctaactgttgagccatctgttgaccatatgccgccgtaccactagccggcataaccggatttttgaacgtgacaccggctaaatttactgttaatcgtcccatcgttttcctcctatgatcaagcttatcggcgggtgtcctgatttagagcgcctgcgttacaaatgactgtgattctcgtacttgcaaaattgccgcgaccgtatctaaggccgtaaacaatggaataccgtgcataattgacgtgtttcgaatcagggtaccatcattttcagcctgttcttcatccgaaaccgtattaatgacgacttgaatttcgccagcttccatgcgatgcagtaaatcatgctcgccactatcgatcttgtcgacggtcgtaacgggtaacccgtgtgtggtcagagcagtcgccgttccccgagtcgctagcaattggtagcccaacgcatggaaccgcttggctaacgccactgtttctggcttgtcttcatcccggacagtcaaaagtacgttaccatggctcggcacgtgtagcttagccgcttcaaaggctttgtaaagcgcctttgccatcgtgacatcgctgcccatgacttcacccgttgacttcatttctggtcccaacaaactatccacacgattcaactttgaaaatgaaaagaccggcgctttgacgtgtactaagggacccggtgtgaccaagccagtctgataaccttgttcagccaatgactggccaaggattgcccgagtcgcaacttgagccatcggaatgttcgtgaccttgcttaagaatggcaccgtccggctcgcgcgcggattgacttcaatcacataaacttggtcgtcgtggattacgaattgaatgttcatcatcccgacacagttgagcgcaatggctaatttttcagtataatccacaatttgtgcttggaccgccgccgaaagtgactgtggcggataaacggccatcgaatcgccagaatggacacccgcccgttcgatgtgttccataattcccggaatcaagactgtttgaccgtcacaaatggcatcaacttcacattccttcccgaccaaataactgtccactaaaacggggtggtcatgcgacaccttgaccgcgttatgcatgtaatagtctaagtcggtccgcttcttgacaatttccatcgcccggccaccaaggacataactgggccggacaaggacgggatagcccaacttatccgcaatagctagcgcggttgcttcatcacttgccgtatcaccagccggttgtggaatagctaaagctttgatgaccttatcaaattcgtcacggtcttccgcacggttgacatccgccacactcgtccctaatattttgataccatggtcagccaatggtttcgctaagttaatcgctgtttgaccaccaaattgcacaatcacgcccactggtttttcaagttcgatcacgtttaagacatcttcaatcgtcagtggctcgaagtacaatttgtctgatactgagaaatcggtcgagacggtttccggattactattcatgataatcgcttcatagccagctttttgaatggctttaacggagtgaacggtagcatagtcgaattccaccccttgcccaatgcgaatcggccctgaccctaacactaaaacggatggacgtttcgtgacaatactctcattttcaaactcataagtgccgtagtaataaggtgtctccgaagcaaactcaccggcacaagtatcgaccatcttataaacgggcgctagtttgtgcgctaagcggaagtcgcgaacctgatcgattgtttcgtgccaatagtcagctaccgtttgatcggcgaagccattgcgtttagcaacagttagtgtctctatgtcatccgtatgggtacgcaaagcttgttcgatttcaataatgtgtaatagtttatccaggaagaacacgttgatcttggtgagttcggctaattcatcaatcgggtaaccgcggcgaattgcttccgttaagtagaataaccgatcatcctgcgcatgaatgagcttatcgctgagtacatcatcatcaacactacgcaaagcgggttcttcaacgtggtgcaccccaatttctagtgatcggaccgcctttagtgtggcttcttcaatattgcgcccaatcgccatgacttcgccggtcgccttcatctgagtgcccaaacgacgatcagcatgggtgaacttatcaaacggccagcgaggaatcttgcaaactacatagtccaacgctggctcgaattcagcgtaagtggttcccgtcaccggatttttaatttcatccaaatgcaagccgactgcaatcttggcagccatcttagcaattgggtaaccagtcgctttggaggctaacgctgatgagcgactgacccgcggatttacttcaatgatatagtaattaaaactattcggatcgagggccaactgaacgttacagcccccctcaatcttcaacgcccgaataatcttcaaagcagcatcccgtaataattgcacttcgcgatctgctaacgtttgaacaggtgcatagacgattgaatcaccggtatgaatccccacggggtcaaaattttccatattgcagacgaccatcgcattatccgcagcatcacgcataacttcaaactcaatttctttgtacccggcaatactttgttcgatcagaacttgggtcactggtgataacgccaacccattttcggtaatgtcgtgtaactgttggggcgtctcggcgatgccaccgccagtcccccccatcgtaaaggctggtcgcacgatgaccggataaccagcttgctcagcgaaagccaacgcttcgtcaaccgtccgcgcaataccagaagctggcacgggttcgcccaattcttccatcagtgccttaaactgttcccggtcttccgcctgatcaattgcgctgagcttcgttcctaacagttcaatgtgcaactcatcgagaatacccgatttagataattccatcgccatattcaagccctgctggccgcctaaagttggcaaaatcgcatccggatgttctttgcggagaatctgtgaaacaaattcaagtgtaattggttccaagtagacctggtccgcaatttctttgtccgtcataatcgttgcggggttagaattgaccaagaccacttcataatcgagttcttttaatgccaggcaagcttgtgtcccagaataatcaaattctgcggcctgaccaataataattggtcctgaaccaattaccataattttatgaatatctgtccgtttaggcattgaattggcttcctttctgggttgcttgattagccgccatcaaatcaataaattcgtcaaaaatatgatcagcatcgtgaggacccggcgctgcgtccggatgatattgcacggaaaaggccgcgtagtcgcgatgccgcaagccttccacggtaccatcattaatctcctcatgggtgattaacaagtcagtctgcgctaatgaatcccgatccaccgcgtaaccatggttttgcgacgtaaaatcaatccgcccagttgcaatctcacgaacgggatggttaaacccacgatgtccgaacttcatcttgaacgtgtccgcaccgtttgctagcgcaaaaagttgatgtccgagacaaattccaaatagcggcacatgtttttccacttctctgatcatctctaaggctcccggaatatcttggggatcaccagggccgttcgtcaacatcacaccatccggattcaaagccatgatttcactcgccgtggtattgtacggcaacaccgtcaagttgcattgacgctttgctaattcgcgtaaaatcgaatgcttcaacccaaagtcgacgacgaccacgttggggcctgtcgctgggttgggataggcgttattcgttgagctctgggcaacaacggcccgatttaattccgtgactttgagccggtcaaccgtatctggtaagacgttatcgacgatggtggccttcatcgcgcccttcgttcggatatgtttagtaaccgcccgcgtatcaatatccataatgccaggaatcgcattctgttttagataatcgtccaacgactgagcattacgccaattactggctcgtcgggcaacttcgtgaacaacaacgcccttacaagttggcttgattgactcatggtcatcccgattaatgccgtaatttccaatcaaaggatacgtaaacatcaagatttcgccattataagactggtctgtgatcgactcttgataaccactcatgccggtattaaagactaattcaccaaccgtggccgttgtcgcaccaaaccccgtgccggggtaaatcgtaccatcttcaagtactaagtatcgtttcatgcttgcgtttcctttccatatgccaacttaccgtcaactagtgtcattaagacgttgccataaacgggccaaccgataaacggggaattgtgccccttcgataacatggtggccgcttcgatttcatattgatgatctaaatcaataatggttagatcagccggtgcccccactaccaaccggccggctgtatttaagccaaatagttcagccggacgcgtgctcatcagttcaattaaacgaccgagcgtcagtaaccgggtcttgaccagcgccgtatatagcgtggcaaaggcagtctcaatcccagtaatcccgaaggctgccgtcttcatgctgccctgtttttcggcatcagtatgcggcgcatggtccgtcgcaatcatgtcgatcgtgccatccaacaatcccgcaactaacgctgcgcgatccttggctgaacgcaacggtggattcatctttaacatcgggttatccatcgtaatatcttcatcacaaaggagtaaatgatggggcgatacttcacaagtcacgttgatgccagctgctttcgcattgcgaatcacgcgtaaactttccgccgttgagacgtgacaaacatggtagtgaaccccactcgcttccgccaacatgacatcacgagccacttgggccgcttctgaaacattattgataccaggcaatcctagccgatcagcaacgggccccgcgttcatcacgccatgatgataaagcgaatcatcctcaacgtgtgccgctaatggcaacccaactttagcagcaccttgcatggctgcaaacatggttccggccgtttgaacaccggaaccatcgttactgacggcaaaggcccccgcagctttgatgccggcaaagtcaacgagctgttcactagtccgcccagtcgtaatgctggcatattgtgcgacgtgaacatgtgcttcctgctgattacgcgccaccatcgtcgcgacccgctcaggtgtatcgggtaccggatccacattaggcattgctccgaccgttgtgaaaccgccatgcgccgcggctaacgttccggtcgcaatcgtttccttcgctgtttgaccaggatcgcgtaaatggacgtgtacgtcgacaaagcccggactaacaaagtgctgatcggcacaaatgacgtgatccgccggtccaaactgatcgtgcagttgatgcccgatcgccttaattcggccctcggcaatcaggatatccgttgtttgtaactgccctgcttgccacacttgagcattcttaattaatgttgtcatgcgttaaacctccacttgagttgctgaaattaatccttgatgagcgaggacgctcgccaccattgccatccgaatataaacaccattcgtcatctgctgaaaaattcgtgattgcggcgcttcaactaagtcactcgctagctcaacacctcgattaacgggggccggatgcatgataatcgcatgcttgggcattcgtgcggcgcgctcagctgttaaaccatactgttgatggtaggcagacgcatcgaaggtctgattgttcacttgcgataatcgttcgtgttggacacgtaataacatcatgacgtccatcgttgcgactaactggtccatcgtctgatattcgccgtatgcttcaaagtcacggccataccattctttggggccgccaaagtaaacctgggctcctagttgcgtcagtaacgccatattggaacgggccacacgtgaatgggccaagtcacccacaatagctatctttaaaccatcaaaatgaccaaattcttcataaatagttagcatatccaacaacgattgtgacggatgttgcccactaccatcaccagcattgatcaaactcatgtcaaacccggcgtcgagaagtggttgataataacgatcgcgttgatgccgaaccactgccaagttgacgccaatggcttcaatcgttttcaaagtatccagcaagctttcgcccttagtcacggaactagtctttgggtcaaacggaatcacctgtaatcctaatcgtcgttcggccatctcaaaacttgtatgtgtgcgggtgctattctcaaaaaataagttcatcgcaaacgttggctgtgacagttgtaccgttttcccattcttgaaagcttgggccaacttcaagtaggccatcacgtcctgattactaaattgttcaacactaactaggttttgactcgttttcatggctattgccgtctcctttgtatataaaaaaagtctagcttccgcaaaaatgtttgcaaagaggctagactccgattaagtggtcacgcatggccaaaccgtttcgttcctctctggaaacaattaaatggttttattcaattaaatcattcttctaatttttcaatactaattccatcatgtccgtcgtgttcttcaagggcgacactgacttgttcatccaaggccgttggaatatttttaccaataaaatcaggccggatcggtaattcacgatgtccacgatcgactaagaccgctaacgaaatctttgcgggacgtccatggtccatcaaggcatctagcgcagcccgaactgtccgacctgtaaataagacatcatcgaccaagataacgtgtttgccattgatatcaaccggaatatcagcaccatttagcttcgcttgaccggcaacatcaaccgcatgatgatcatcccgatataacgtgatatctaacgaaccaactggcacgtcaacgccttccaactgtttcaatcgttgcgctaaccgctgggccaaaaaaatcccacgagtcttgataccgataaataccaggttaccaacacccttattctgctcaataatctcataagtgatccgcgtcagcgcgcggcgcatggtcattgcatcaacgacttctcgtgccattagtttgtcagctccatttctgtaatttcaccttaatccacggggtaaaaaaagagtcaccccgttttcctgcgaaaagcgtgggagaccctacatgaccgttccccttgttagcctcacaggactaagttaaaggtgcttgtttaattggactaagtgtaacgaactccaccacaactgtcaaggactaatcaacttaagtcgcgttaattatctgacgactttggtcatttgccctttatgttgacaagcatcattcaggaacctgacgagttcaatagatttccaatcgtgacacgtgatcgtcttattccggcctctaagaataaatgatgagcggtcgcctaatattagtaccattggtcgttgaatccgttgatattagaacttcaattaaagctgggagaccatcaattcactttaatgactgtttcaatcttaacgtgctaatttagcaacaaatggtctatcaaaatatcattatatgcgaaatctaccctttatgagcaacaacaaactcagcaaaagttaagtccacccatcacttgaacaccacctcgactgaaaggcgttgctgacaatactcagcactggaagccggtgaagttcagacgggttgaaactgaagattatctcaacggcaacgttgaggggtgaactttcacttagctaactggaagtctcaacccgagcgaatcccgtttctgtatgtcggcatccaacgccctaaccaggtgaatttacactaaacaaaactttcttcagcagtcctgcgccggctactcctgcgcttaggataaacctttccaatacttaaattccttaacccataacactggttcgacgcttcatttgtttttaatctatttttcatttaattatagtcaaactgccaaattatcggtatactacttgttaaagataactaattttagggggacttaccatgcgtttacaaacactattacaaacaccatcaatgcaacatatgcgggtaattgcgggtgaacgcggtctcaaacgcgaaattagtaatatcggaatgatcgagtcacctgacattgctgactaccttgctaatggtcagtttttgattacgaacggctatcccttcgtcaatacaaccaccgacccactaactttgatcaaggcgatgcacaatgccaactgtgctggtctcggatttaaggatcatcgttacgttgaccatttaccaaaaaaagtgattgaattagcgaacgaactcgcttttccaatcattattacgcccggtgatgagttgatttctgaaaccatgcgcaaaatgctgagcatcatcttaaagtcacaaactaatgagctcagtcgcatcgtcaaggcaaaccaaacactagcggatttgttgctcaaagacccaaccaacaccacggtcttgaataaatgtagcgagctaattcatcatcctctcttcttaatggatagtcattttcgggtggtcagtgcttcccaagatttaccgatgacccgcaataccttgactgattttttacgcaatcaaaccgatatcgactatttcaacctcaatacccgcgtcattctcccttaccaaacaaatgacctgaccatcatgccactattttcggcttataaggaaaataaggcctttgtaggcgtcgtcgacttggacccggccaactcaactgatcagatgctgacgcaagtcgtcttaaacaccttgagtttcgtcaatggtcgggtggacatgttaaacgaatccgcattccgcaaccaaagtggtttctacttaaacgtaatggatggcggtatttcaaacgacctcgtgaataagactctgaaagcccgcaatattgatccgagtacgaagttccactgcgccaccattttagtcacgactaatcaccaggccctcttaagtaaccatctcttggaacaggttcagcaactgacactgtggtttattaaagaataccaagcatccgtcattgttttttcattaaagcagcaattggtcttattaatcaatgaccagcaaaatgcccagcactttctgaccgccctcgttcaatttattcagccaaagttggacagacaggcgcgtttgattgctggttacagttattcgactctaccactaaccgaactcgcaacaacctataatgaagcggcagaagccttggcactcagcaaaaacagtccccacgcagtcacgatctatcggcccaagtacgtcaaggaactaatttcactgattccacaaaatgaagcgcgatcgtttgtcgaacgggttttaggtggactcgtcagtggtgtcagtgcgaatgaacaacttaatctactcacgaccctgtatggctatttttattaccatcaaaacattgccgaagtggccggccacctagatattcaccgcaatacggtgatttaccgccttaaaaagatcgaaaaaatgctaacgttgaacttggacgatcctgaacagacccaaacactagaaatggcagtgctactttggcataatcaacaatcacaaaagtgaacgttttcattttcatcttccaaaaaaatatcgttttcacgaacattaatttattcggctacatttgtattcggttttcatctgtgctagaataagtctcattcaaataagtggtaattgcctatataatgtcatgatatggttgacgagtttctacccaaccccgtaaaggttggactataagcaaacgaggtcatcccgtttgccggggtgactttttttataggcaaatcagcttaatcgagagaggaagattgatttgaaggaagtatccgcagcacctaaaattaccaatgttaaggcggccattttagggtttcaacatctgttagctatgtattcgggtgatgtgctcgtgccattattgattggcgcggccttgcatttcagccaagaacaattaacttacctagtctcaatcgacattttcatgtgtgggatcgcaacgttcctacaattaaaacgtacaccactaacaggaatcgggcttcccgtcgtgcttggctgtgccgttcaagccgtcaatccgttgattcaaatcggtaaaacatatgggctggggaccatgtatggctcaatcattggtgctggtatttttatttttctgattgccggcttattttcaaagatcaagaacctctttccaccagtcgttacgggatcgctaatcacaattattggattcacgctgattccggtcgccttccaaaatcttggtggcggcgacaccagtgccaaggatttcggtaacttgcaagcacttggcattggttttctcaccatcgcaattattttattaattagcgtgtttgcacgtggcttcatgaaatccgtttcgattctgattggtattttagttgggactttgattgccggggcaatggggatggtttctttaaaacccgtcgctgaagctagctggttccatttaccgaccctcttttactttgggaccccgcactttgaatggtcatccattttgaccatgatccttgtctccttaacaacgatggttgaatcgaccggggtcttctttgcccttggcgacattaccggtcgtaaaattgaaggcgacgatttaaaacgtggttaccgggcagaaggaattgccgtcatcctcggtggcttgttcagtaccttcccctattcaacgttttctgaaaatgtcggcgtcgttcaattatctggtgtcaagacgcgaaagccaatttacttttccgctgcgttcttagttgtattgggcctactgcctaagattggtgcgctagcgacgattatccccgacccagtacttggtggcgccatggtcgtcatgttcgggatcgttggcattcaagggattcgaatgttagctcaagtcgatttccgcaataacaataatttactcgtggcagccgtttcgattggtcttggtttgggcgtcacggtgcaaaccaatatcttccaattcttacctggtgcacttcaaatcatgttgagcaacggggtggtcgttggtagtgtagccgcagttggccttaacttactcttcaaccgccacgcagccgaaaacacgattgatgatgaatcagtcggtctcaatgaaacagaacaaccttaattatgacgcttaataacagcggttcacggtcctaatctggcagtgaaccgctgtttttttgttctgctacttaatagccgctctcattctattgattgctttatactgccattttttgctgaatgtcaagcgtcgtaccgatgaagactttttttaaagtaactttctttcgacttggcataaaacttgcccatgctgccgaagagtcatctaaacctggtccattccaaaaacaagccatcgtgaggcaataaactgattaatcccctgttaccctaaaaatcagtatgttatactagacaattgttgaattgttagttttttattaattttaggagtgggtcattattctagaacaattatttcatttgcgtgaaaaccgcacttcagtccgtcgcgagttgattggtggtctgacgacctttttagccatgtcatatattttggccgtaaatcccgaactattgggaagtactggtatgagtaagaccgccgtcttcaccgcaacgattttagcggccatcgttggttgtctcttgatggggctagttgccaattttcccgtagcattagcaccggggatggggctgaatgccttctttacttatacagttgtccaggaatggcacattccttggcaaaccgctttggcgggagtctttgttgccggaattcttttcatcctactaacgctctccaagttacgcgataaactgatcaacttgattccaagtgcgctaaaatacgccgtatctgccggaattggcttgttcattgctttttcaggactacaaacctctgggattatcgttgcgaataagtccaacgcggtcgccctgggtaacttgcacagtcccaccgttttgttggcgattttcgggattatcgtcggcatcatgctagtcaccgctaatgtaactggtggtattttctggggcatgttcatcaccgccgcagtcggaatgatcttcgggattattcccctaccaactgggattatcagtggggttccgagcgttcaaccgatttttggtcaagccgtgacacaccttggtaatattaattcgtttcaaatgatcattgtcatcctgacgttcttcatcattggccttttcgatacgtcgggaaccttggttggggtggcaaccgaagccggcatggtggacaaagaatccggcgaagtcaaaggcgttggtaaagcgctctttagtggtgcactcgccacaactttaggagcagtctttggcacgtcaccgacaacggcttatgttgaatcgacttccggcgttgccgtgggggcccgtactgggttatcttccgtcttcgttgccctcttgtttgccatcgccgcctttttctctccaattttgacggtgattacgtccgcggtgaccgcttcagccctgattatcgttggtattttaatgttatcaaacgttcaatatattgattggaccaagtttgaaatcgccgtcccagcctttttcaccatgattatgatgctactaacttacagtatctcagaaggtttggccgttggctttatcttctacccaatcaccatgacggtcaaaggccgttggcgtgaagtaaacgccctcatgtggacgatgatggtcgtcttcattctctactttgcatttgtcgcttagaactgatggttcgctaagcaatgatggcagtctaaaacacccctgagtctttaactcaggggtgttttttagtaggcacggctgcatctaacgcctactagtgtttaagaacttgttgattatggtaatcttcagcgtagacttgggcaaagtcagcaagtttaacatcgcctaatcgaggttgatgtgctcgataatccgcgtaaaaatcgtggtcacgctggtaagcgaccgttttaacatattcccgtgcaaatgcgaccggggttccggcagtcactaaatgatcttgcatgacctcatcaggcacttgtgaaacgcgcaaatccggcattttaagagcctgtgacagtgcggaagcaacttccaaataagttttctcatcactcgcaacatatgtcaccgtttgccccggtgtcggttcggtcagcgccttaatcagtacagttgtaacgtcgaccggcgcaacccacacgttcttaacagccaaattggcatttgtgtagattcgatgactctttttaacggttggcacactgctcagtaaattatagtacattgccgttgggcggataaacgttaagtccacgtctggtaaagcggttgttaacgtttgttcgataatatgatacatgtaaagtgcaccgacttctggtcccaagtcggcccccacgctactcagattcaccactcgttttacgccggctgccttgatcgcggcggcatagatgtccgcttgtcgtttggcagcggtataaagatcatcactcgccgctataccagttaccatgaggtataccacgtcagcgcccatgaacgtcttggtcaaaaacgcttcgtcatcaagtcgaccaatggcaggggttgcgcgaaaaacctttatcaaactactgcgagttgcttgatgactgatgaccgtcacttcatgaccagcatgggtcagcttaggtaccaaggtctggttaatacgaccgattgaacccgttaaaacaattttcattttatgataaccctcttctatacttattaaattatccgtcaaagtcattatcgattataagcgaccactaaaaccccgtcaatcactggtggtttagttggctaaacagtgttgatgtgcggttgcgtgattcgttcataagacaggactgattaacgttaatcaaaaatcatttctatttatcaagagataatttttgttgaaactgtgcaaaattaggcctataatgtcaaaatgtttgacactgtcaactacgacggttagtcgtctttcctgttaccataagtttttcttacggagattatattagatgagtctagcacaattagaaataggattactgtggttgacaggctcaattgcggtcatcttcatcctgacgattggtacttattattggtactcccgcaaacgttccaacaattaccttgaaaatgatgattttaatctacgctactttattcaaaaacaagtcgattttcgtggccgcactaccggctatgaatgtctcctgcgtcaacaaaatactgatggttcgtggtcattaccaccacaacttgactcacttccacttcagcgggtgatcttcctgcttgaagatacctttaaggcgctacctgatgaagcgattacgttatcaatcaatttagaatacgaacaaatcatcagtcccgaattccgttattttgttcgctgggcaattgcgaacatcgaaccgatgcacttggcaattgagtacacacctcaataccaaccgcgtcgtatcaataaacgcctatttcggcgacgaattcgtgaagcccgcggttacggcatgcagtttggaatcgataacgtcggtgcaagtctagccaatcttaaaaacattcagtggcttttaaaagatatcgacacgctcaaatgctcaatgcgctcatttcgcaaggaagacccatccgtctggctggacctgaacctccaattctggaatcagctctctaaggaaaacaatattgatctaattctaatgggaatcgaaaatgaggccgatgaacaactcgccgagcaactgcaaatcagcattcgccaaggctacttattcggccatccaatcaatccccagcaatcaaccacaaaggagaaccacgatgcctaaaccaaccactgatgatgttaatcggcaacaactatactctgatgcgtactttgacactggccattggggactcaagattcgccaaacgatcgttggtatcgcgggttggatcgcagtgattgtgcccatcaccgtgacagtcctttccatttggtcaagttataatccacacattccgcgtttctggcactaccatgaaggtcttttcgaatttaagttcatcggtatcttactggccttttgctttgcactcgcatccctttttgcagtgaccatgaccattatacagaatcgtaagcgtgaacgtgtcgttgaacagtggccaacctttaatcccattaatcagaaaaaacggcagcaactgctcgctcagttcatggcggaccgtttcggcaatgccgaatttcgtgaacatacccgccactaccgggtcaagccagaacaaaatctcgatactaatcagattcagcaactttatcaacaaaataatttagacgatattaacgattaaccagggggcgccatgacaaatatttttattgaccacatattcgccgcaaccttatttaaatcggtaatcaacatcgcactcctgattttatgcctctaccccatcgttggctcttttttctggttcgccggcgcgctatcctaccgctttatcaagaccaataagcgtgatgatgactggcagtacattccggctgaacagcaaccaatgattaccatcatgatcccggcgcacaacgaagaagtcatgattgaagaaaccatcacatacttatttacccagctcaattatacgaactacgaggtcctagtcatgaacgatggttcgactgacaagacggccaccattattcaacggttgcagtccgtctatccacggctacgaaccgttgaaattgagaaaaacaagggcaaggcccacgccttcaatattggcatgtactttgcccagggtgagtatattctcagcaacgacgctgatacgattccagaaaaggacgccctgatgaagtatatgaatttcttcatccatgaccgcgatatgaatacatccgccgtcaccgccaatatggatgttcaaaatcgaacgtcgcttttaggtaaatctcaaaccgttgaattctctagtatcgtcggtgttatcaagcggagtcaaacttccatcaacgactctatgtacgcgtatagcggggcaaataccctctaccgcaaacaatttctaattgacgttggtggctttcgacaaaatcgcgcgacggaagatatcagtattgcctgggatcaccaaatggtgggcgccgtcccgcggtttgcccctaacatcgtcttccatatgaacgtccccaccacaatccgagacctttatcatcaacgcaaacgttgggcacagggtggcacggaagtgtggttaacgaacattaagaaattcattttccacccaatcgttcatcgctatcaactatcaatgttcgtcgattcgacgttgtcaatcatctggtcctttttcttcgtcatcacttccttgatgtttttgattctgatgggttacttcctgataaccggcaattttgaacgagtctaccacggcttgatgttgtcatttgtctttgttagttttgaactattggccgggttcatgcaactgttagcggcactcctgttggaccatcatggtgcgaaactaaagtactggttcttcgccccactctacatgttattttactggatgatcaatcctatcaccgtcgttgcaacgtttattcctgcactcaaaaccattctgggctttggctccggaacgtgggtcagcccgaagcgacagtcattgcagggtaaaaagtaaaacggtgtcgctattaacgctttcaataatcgataacgggtctactggtgcgagaacttgcaaccagcccaaccaaaaacgtgcacttacctgagtgataactgactcaggtaagtgcacgttttaatattaatcccttttgatcgttttcttagctatgcaaacggagctgcccaggccaccctgtgactagctacgctgagtaacaggtcccatgtgtcacgtgccactgaacacagagatcggcaggtaaatcacgaacggcctcacgacttacctgtgtgccaagttcagtaattgatcgcccttgctgactgccgaggccctggcgattcagctgaatcgtccgcgcaccaactcgatacaagtcactcatgatctggtggtaggctgcggccaagtcatgcaccatttccgtatctgattgatagactcgattaagtgcgcgcgcattatcggaccgtttgagttctgccaagcacagctcgggagcgggcaagatttgtttatccacagttccaccactgatttgattgcgcatgaattcaaaatgcgcaacggcaggatggttgaagccactgattttaccggtcaacgcgagcgccggtaccgaacctatcccggattgggtgatgccttgtagcccccagaaaaagttaaagtgccaccaatttagattatgcggcttatcaaccggtttccgaatatgatgcataaaagcagcgtcctccatccgtttaagtcccgccgcattaatattcagcgttgttgtgccccgatgcaaccctttttgagaccgcattgccatttgccaaccatgtacacggtgcctaaccatcatcatcaatgtgccaaattccatgcccgtttagcctccaaattaattgcattctgccaatataaaaatcgtcccctactgcttaaaaaggacgatttcaacgtttgggtcagcctttaactgccaacaccaatcattattcttttatgacgaatttaagtaatgtttccagcatagaatggtgctcaccgaatgtcaagcgctaatcgtgggacgctgtcatccccttaacgccaatatcagttcggtacactagatcaccgactctgagttggtcgatttgttgataaacagcccgctgtgctgcgaccaagctcggggcacttgcggtaaccatcatcacccggccacccgcactgaccaattgatccggggtacccgcaacgctagcataatccgcaccagcaaccgtcggaaccggtacaccggcttcagttggtcccggataaccgggagcagctagtacgacgccaagataagttgccgtcgtttgccactgcgcgtgtggttgccgatgttgcaataaatcgacgatgacttgataaaaatcactctgtagttgtggtaataagatctgcgtttcaggatcacccagtcgcaaattatattcaataacttgaacaccggtcgcagtcaggattcccccaacatagataaccccttcaaagcttaacccatcggctttgagacctgcaatcgtcggttcaataattgtcgcaatcgtttgatcgataaccgcgggcgtgatttgcggtactggtgaataggcccccataccacccgtgttcggtccccggtcatggtcctgtaaccgtttatgatcttgggcggtcggtaataacgcatagtgctcaccaccaaccaaaaccatttgggaaaactcaaagccagcaacgtagtcctcgatcaagaccgtcgaactagttttaaaggccgtcttaatcgctgccgcggcttgttcataactcgtcgcaaccgtcacccctttaccagctgccagcccatcgactttgataacttgcggcaccgcttgttcatgactataagctagtgccgaatccaattcatgaaattgccggtagtcggccgtcggaatgtgatggcgactcatgaaggccttcgcgaataccttagaactttccaactgtgccgcagcttggttggggccaaagatagccaggccggctgcttgaaagtaatcaacaatgcccgcggctagcggtacttcgggcccgacgaaggtcagggtaaccgtattggcccgtgcaaagttgaccaaccccgcaaagtccatttcgtcaatcgctagtgtccgaataccatcccggatcatgcctggattaccgggtgcacaatagacggtactgacttgcggacttgccatcattgccttggcaatggcatgttcgcgaccgccaccaccaactactaatacgtttgccatgcacgcacccatcctttcattaatgccggaagtgtcgaacaccagtggtgaccatcgcaataccataacggtcggccatggcaatcgaatccttatcacgaatactaccacctggttgcacgattgcacgaatgccgtgctgcgcagcatattcgacgcaatcatccattgggaagaacgcatccgaagctaggatagcattttcgtagccagcttgttgcatcgccttaccgatggcaatcttagttgaatcgattcgattcatctgaccagaaccgattcccaatgtccgatctgcggtggttacaacgaccgcattgctcttaacgtgcttcacaacttgttggccgaaagcaagtgcttttagctgcgcaggtgtcggttgggttgcggtgactacggtaaaatcagctggcgtttcgaaggccgcgtcgacctcctgacgtagtaagcccccaccgactgaaatcgtttcaaacttatcggccgtgtgcgtttgctcaaagtcaaccgtcatcaagcgcagattcttcttcttggccaaaatagcaaaggcatcgtcatcaaaactcggggcaataataatttccaagaagagtgcgtgcatcttctcagccgttgcgagatcgactgggcgatttaaggcaatgattcccccaaagattgaaatcgaatcggcttcataggctttatcccaagcagcctcaatcgtcgtacccaagccaaccccacacggattcatgtgcttcattgcaactacggccggctgctgatattcacagaccatccgcaaggcggcatccgcatccttgatgttattgtaagaaagctctttcccatgaatttgcttggcacccgtaatcgagaagtgcgctggtaaggcattttcgtaaaaggcagccttttgatggctgttctcaccataacgcagggcctgcttcttatcataagtaagggtcaacttttctggaaattcttcagtcgttaaatattgggcaatcaaggcatcataggccgcagtatgttgaaaaactttggccgctaaccgttgacggagtgccggtgtgaccgcgtccgtctgcaaatcagccagaatctgctcataatcagcaggatcaacaattggcagtaccgcggcaaagttcttagctgcggaacgcagcatcgacggaccaccaatatcgatttgttcaatagcttcagcttgtgtgacgtctggttgttgaatggttgctttgaatgggtacaggttaaccacgaccatgtcaatcggttgaataccagcttcttttaattgcgccatgtgcgctggcaggtcacgtcgtgctaatagtccggcgtgaaccttaggatggagcgttttgacccgaccgtcaagcatttcaggaaaaccggtcacttcttcgattccgatgactggaatatcagctgcttccagtgcctttttggtcccacctgttgaaatcaattcatagtcaagggcaacgaggcccttcgcaaaatcagttaatccctgtttatcagaaacacttaacaacgcacgttttgtcatcttaaattgctccttcattaatgagtgtctgtaatacatctggataaaattggtgttcacaatcatgaatccgggtcgccaggctggctagcgtatcgtctggtgcaaccggaacgacccgctgggcaataatttgcccggtatcgattccggcatcgatatagtgaatggtaacgcccgtctcagtcacaccagcgtcaaaagcatcctcgataccgtgacgacctggaaatttcggtaacaatgctgggtggatgttgataattttatgcgaatacgcattcaagagggtcggaccgataatacgcatgtacccggccaataagaccagtttaatttgtcgcgcttgcaaggccgtcaaaatgatggcttccgcggccgctttattcgcataatcatgaaaatcaacaatcaatatcggtatgttagctgcccgggctttatcaatgaccggcgccgtgggttgatcacagacgagtaacccaatcaccaccggtaactgccgttcaataatcgcttggtggagtgcaacaaagttggtgccgttccccgaagcaaataccgcaatcttattaggcatgttcagcctcctcgaaaacgacgggggccgtcccagtttggactgttccgacgcgataataggactgcgcgttggccgtcaaattagccgtcacagccgccacttggtcggggtgaacgaccaaaaccattcccaggcctaagttaaaggtcgaccgaagatccgtggcagtcagcccaccgagttcggccaataacgtcataattggcggcaccggccattgacccaattcaaggtgcgcactcaagcccgccggtaacgctctggcgacgttctcaatcaagccgcccccagtaatgtgggcgatactcgtcactaatttctgctgtaataatggttgaactgcatcaacgtaaatggtcgttggtcgtaaaagttccgtttgtaaatcatgaccaagttcgtcaaaaaccgtggtcaattggtagtcgtgttgtttgaataaaatatcacgaactagactaaacccattcgagtggaggccattagacggcaacccaatcaagacgtccccagcccgaacatttgctggtgataacaggtccgcgcggttcgcaattccgaccgcaaaaccagcgaggtcgtaatggtcctgaccatacatatcgggcatctccgcagtctcgccaccaatcaacgctgtatgggcctgctgacagcccgtgacgacgccagtcaaaatggctttgacccgcttctgatccgtatgtccaagacctaagtaatctaaaaagaactggggggtcgcgccttgtgccaaaatatcattcacacacattgcgaccaagtcaattccaatcgtggtatgttgatcagcagcgattgcgactaagagcttagtccccacaccatccgtccccgctactaacacgggatcgttggcagttgcatccgaactaagtggaaacgcccccccaaacgcgcctaattgctgattgccactcatttgtttgaccgtctttaagacgtcgtaaccagcgttgatatcaacgccagcccgcttatacgcatcgctcacttgatcaccccttcatgattggcttgtaattgcgcaatttccgcatcatactcggcttggtaatcatacagggccgttggataatccccattaaaataggccatgcatagtccaccatacggttcggtggtcgacaagccaactgcatcaacgacgccctgttcactgagaaaaccaagtgagtccgcaccaaacgtctgacacatctcccgaatcgtttgctgagccgcaatcaattcattagtcgattgaatatcgataccgtaaaaacatggatagcgtaatggtggcgatgcaattcgtaaatgaactgactttgcacccgcatctttcaataatttgacgatccgccgactggtggtaccacgtacaatcgaatcatcgattaagacgactcgtttaccagcgacaacacctttgaccgctgaaagcttcatccgaaccccctgttctcgcaatgcttgggtcggctgaataaaggtccgtgacgaatattgatttttaattaatcccatctcgtaaggcaggccactcgcttccgcatagccggtcgccgctgataaagatgaattgggtaccccgacaacaatgtcggcgtccacgggctgttcaacagcgagctgagcacccattcgtttacgtgcagaatggacgttgacgccgtgaatatcagaatctggacgtgcaaagtagataaactccattgaacaaatcgccaactgtgtatcagtcgtataatggtcgatcgtcaaaccatgatcatcgatcgttaacaattctcccggctgaacatcttgaacaaacgtcgcaccaatcgtatcaagcgcgcaagtttcactacaaacgacgtacccgcccgtgggtaactgaccgacgactaatggtcgtaacccgttaggatccaaagcggcaatcaaacaatcattcgttagtagtaagtaagcaaagcctccgtggacttgacgtaaagcatccttaacctgttccgttaacgttgctgcggggctgcgtcgaatcagatgcattaaaatctcactatcagaactagcatgaaaaatggcaccatgctgttccaaccgtcgccgcagtgtcaccgcgttcgtcaaattgccgttatgtgcgagtgcaaactgtgagtcgctaaaattaaaactcaagggttgaatgttttccaatccatgattaccagccgtggcataacgtacatggccgactgcagcttgacccgtcaaacgtgccaaccgccgtgggtcccgaaagacatcagccaacaaccctagtccgcgttccgtctgcagtttgccgtgatcattcgccgtgataccggctccttcttgcccccggtgttgtaacgcatggagcccaaagtacgttaattgggcggcgtccggcgagccccaaaccccaaagacgccacattcttcattcagacttcttacttcagtaggcatggtaaggccccttcccacaactgtttggcgaaactaaccttaatatcaaacgcctgatcagcagtttgaacgtgtagccgatccgttgcagttgttcgtcctaaataggtcacatatggttccattaaactttcaaacgcggcttgctgtgctggtgtcaccgagataacaaatcgtgactgcgtttccgcaaagaagttggcagcgggcaagtcactggccagttccaccccgatattttgtggaaaacatgattcggcaatcgtcgtaatcaagccaccttcagaaacgtcgtgggcactagcaactagtcctttttgaatcgcagttaacaatagacgctgattacgattttcagtcacaaggtcaaaatcaaacagctcgccactgattgttcccgtcaacatcttttgcagctcactaccattgaaattggcttctgtggtacctaacacgtagactgcatcgccagcgtgtttaaaatcgctagtcgtaatatctttctgatgcttaattaacccgaccatcccaatcattggggtgggatagatggcttccccgttcgattcattgttcaacgagacattgccagaaatcacgggcgtattgaataattggcaggcacgagcgatgcccatcgccgattcgtccaaatcgtaaaattgttcaggtttctctggattaccatagttcaagcaatcagtgatgcctaaaggttgcccaccggaagcgacaatgtttcgagcagcttccgcaacggcgatttctccaccgacacgggggtttaagtataagtatcgcccgttaacatcggtggtgaccgccaacgccttatccgtatgtcgaatccgtatgacccccgcatcggaacccggcttgacgaccgtattcgtttggacctgcgagtcatacgttccatataacgacgctttggaagcaatcgttggctgttggagcatcttcttcaatgtgccagttgcatcaactagtcgtggcataaattgatgatggctctgatggttcaagcgcgttggtcgtttcttttcgcgttcatagaccggcgctttggtcgcaagtgcatcgacgggaacatctgcaactaacttaccatgatggaataattgatactggtggccggctgtcactttaccaattgtgacagcatcaagaccgtacttttcaaagacttgataaatttctgcttcggcaccagctttgacacatagtaacatccgctcctgtgattcagagagcatcagttcaaacggcgtcatgccagtttcacgttgtggtaccaagtcaagattcagtgacaacccactgcctgctttggacgccatttcggctgaggaggaaactaggcccgccgcgcccatatcttgaatcccgattaaaacatcacgatgttcatgaataacctcgagacacgcctccatcaataatttttccataaagggatcaccaacttgaaccgcggaacgctgggtttcattggcgtcattaaattcagcagaggcaaaggacgcaccgttaatgccgtcacgccccgtttttgcgccgacataaataacggcgttgccaattcctgttgcttggcccttctgaatatcagcttgatccaagattccaacacacatggcgttcaccaacgggttcttctgataactcgcatcaaataccgtatcaccaccgattgtcggaattccaatacagttgccataaccgccaatgccggcgactacttgcgaaatcaagtatttcgtatgagcatcagtcggttccccaaagcgaagactgtccagcagcgcaatcggccgggcccccatcgaaaagatgtcccgaatgataccacccacacccgttgccgcaccctcataaggttcaactgcagacggatgattatgactttcagctttaaagaccacggcctgaccatcaccgatgtcgataataccggcgccttcaccaggcccttcaagtacctgttcaccctgcgtccaaaattttttcaagactggttttgaattcttgtaggagcaatgttcgctccacatgccggaaaacaacccggtttcagtctcgttaggtaagcgttgaaggaccttatccgttaataattgatactcagcatcggttaagccccaatcccgatagaccttagaatcgcgaacatctgtaggtgataatggttgctttttaagcatgggtgacctcctcttgactcgcaatgaccgattgaaaaattccgagaccatccgtggaacctaagatcatctccacggcccgttccggatggggcatcatcccaagcacatttcccacttcatttgtaatgccagcaatattagccgtgctgccatttggattctcgacgtattcgaagatgatttgatgattagcacgtaattgcgccaaggtggcctcatcacaataataattgccttcgccgtgggcaatcggtaaactaatttgatctgtcgatccgtatgcggtggtaaaaatcgtctcatgattggcaattcgtaatgggctgtcctgacaaataaacttcgctgagcgattggcctgcaatgcaccaggtaataatccggcttcggtcaagacttgaaagccattgcagattccgatgactggtttaccagcgttagcaaatgcaataacggccggcatgatgggcgcaaagcgggcaatcgcaccactccgtaaataatcaccgtacgaaaagccaccaggtaacaccaccgcgtcataacctgctaatgaggtcgctgtcgccggaatcaaatcagccgtaacgtgtaaaatatcgcgcaaggcattcaccatgtcatgatcacaattagaaccaggaaagactggtacggcaaatttcatcattacaaagcctccatctcagtaatttcgtaacgataagtttccatattaacgttggctaacaagcgatcacacatctcgtcgatttcagcggcaactggccgatcatccgcgtgaattttcacctcaaaatacttacctaattcaacggcatcgacattcgtatatccaagtcggtgtaaggcatcatgaatcgcctcacccttggggtctagaattgattgcttataagtcacatagattttaactaagtacatgttaggcctcctcaacggttgctagccgcgtcaatacttcctgataaacactagtcaagtcgcctagatccttgcggaagacatccttatcaagcgatgcaccggtctttaggtcgactaaccgacaactatctggtgagatttcatcagccagcaagactttaccggtggtcgtcaacccaaattcgattttaaaatcaacgagctgtacccccatcgccgcaaaaattgccgtcaaacgctggttaacctgtaaggcctgccgtttaatttccgccacgattgccggtgttgcaacatttagcgcgtggatttgtgaatcattgataaatggatcatccagctgatcactcttatagaaaaattccagtactggttctgcaaatttggttaagtgtggcacggcaaatttacgctcaaaactacccgaagccgcattccgaacaactgtctccaagggaatcatggtcacgcgacggacaagttgcacatagtctgaaggttgctcaataaaatggttggcaatgccgtgattggctaagtctttgaaaatcaaactcgcgatgcgattattcaatcggcctttctggtcaatgggaaccttccgcttaccatttagcgctgttgcttgatctaagtattcgacccatagaatttcaggatcattagtggcatacatcgctttcgctttacccgtgtaaagcaaagcttgtttctcaatcgctgccgtcattattattgttcccctttcaaatttgccaccgacgctaatgctgcgtcaatatcgtgatttaatacggtgacatgacccatcttgcgctggggcttaatggccgccttaccgtagtcgtgaaaatgccattctgggtgttcaaccaactgttgacgtgccactgttaagtcatcacctagcagattacgcatcactgccggactggtctgcgtaatggccggaatcggtaagccacagatacttcgaatatgggcctcaaactgcgagatgttgcaggcctcaatcgtatagtgaccagaattatgtgggcgtggtgccagttcattgactaataaagtatcatccggtaaaacaaagaattcgattcctagcacgccgcgtagttccagagattcagcaatcgaaaccgcaattttgcgggccgcactatgaacactgggctgaacattagctggggcaatcgttgtgtgtaagatatgatgttgatgctgattttcaactaacggaaaagtcgtaacaacaccagcagcactacgcgtcaccatcatggaaacttctgttcgaaatttctgccgcgcctctagaatgcacggctgtgtcaataaggcactagcggcttttgtcaccactgctgtgtctagatccgtttgtccgtgaccatcgtagccacctgccgccgttttgagaattgccggcgtaccaacacggttgagggcgtaatttaatgactgtaaatccgtcaccgctgcgaaagatgtgactgggatgccatgatcatgaagaaattgcttctcattaagacgatctccagtaatatgcaggagtgcagtgccctgcggtaactttgcataggcttgcgcagcaatcaaagcattctcatcaacgttttcaaactcgtaggtcaagacatcactacggcgcgctagatcaagtaaagccgcctgatcatcataagccgcaacaatctgaaaatctgcgacctgggctgccggtgctttgggtgtcgggtcaaggacacctacccgatagcccatcgccttcgcgctaagcgtcatcatctgaccgagttgaccgccaccaacgattccgatcgttgcgggtggtaagagtgcttccttaaaattggcgttcactttgttcagcctcctgacgttgacgagcacgaaattctccaattgcatgttgtacttgtggttcccgtaaaccgataatttgggcggccattagcgcaccattcttagcccccgcatcaccaatcgccatcgtcgccacgggtacgccagctggcatctgtacgattgacaataacgaatcaactccgttcaacgtatgggtcttaatgggcaccccaattaccgggagtagtgtattggcagctagcatcccgggtaaatgggcagcgccccccgcacccgcaataataacttgaattccccgtgacgctgcttcttcaccataggattgtaatgtctggggcattcggtgggccgaaataacgtgacgctcataagagactcccagtgccgttaactgttctgccgctaattgcatggttggccaatcagaaattgaccccataatcaaaccaactttcgccatcatgatccctctttccctgttttcaccattagtttagcaatcaggcgggacactgtcaacgaatttcttaactttatctattaattaacgttttaatgttcgtgttaattaaattgataattagattaatgctacctcaacatgtacgaattacctcactgtttgcaggttttcggtgtctgaaaaaggttatcaactgatttcaagcgactatcttgataatattattaatattgaaatttccgaacaatccgtcatcatctaagtttcaccataacaaacttactgctaccattatcaacaactatccgttgaaacgggccattaacttttgtcggtgcgcaccaacaattgacagcaatgactgggaatcggcgtaggacgagcaactaagcatgtttatgctaactcagactatttatagccgggctaaactgactgccgctgaacttaaaaacaatcaacaacttaatttgcgaacgctttcctaaaggatcggattgaagtgaccaaaataacgcaaaaaaagtctcaaggaagcgattcctcgagacttttttaaggtactaattattttgctgaagcgccggaaacactatcgacatcaggcgcttcaggcttggttggtgcttctggtgcggcttccgtatcggctgaagcgccggagacatcatccaccgctggggcagcatcaggcttcgtttccttcgccttcgatgaagctcctgaaacggcgtccgtcttagcatctggatcaggtgctaacatctggcccgtctgcttcaggtaatacttcacgattggtaagaggtcgagcacaaactcgttgatacctttgtactcacccttatcgtcatgcaaagcttgataatagtgcatcacatacttattagggataccaggtaccggtaacttgaagagatcagtctcaccggttcgtagcatgtgtaccgctcgcttaacaccaggtacggcccgctttggatgacagtcagctagtggattaccggcttgagcaggtgtccgtgaagctaacatcttgtcgccatccatttgatggttatagtataaaaattggttgttggcatcggcatacgtcaattccattggcatcgagttgaggaaccaatttaattggttgacggtcagcacaccccgatcgagcttaacgtagtcgtcaccctcagccgcatgggtcttggcagccgcttgttcgacccaatcagccgcatgcatgttgacgcccttgattgtcgtttcaacttcgcccttagcctcaaggtcttcattcttccaatcatcagcgtgtgcttccgcatccatcgcgttgaccatcttgacaaacttcagaaacttgcctaacgtttcttgtaagaacgagacagtccgagcatccttcagattgttttggtcatcgaaagcctgcttaacttcgccgagcaaaaattcattaccaggcatgaccacagcatcaacacccggtgactctaaaatctggcgtagattcaactgtgcccgcgacgaaccttgatcatagtaagaagcgccaacgatcaatacgggtttccctgacatcgggtgaattttaaacgacaaccattcgatcacgcttttaagtgcagcagtaattgtatgattatgttcaggtgtcgcaataatgaccccgtccgcctgcatgatctttcgtttcaaatattgaacagcttcaccttctgtttgatcatcactctgattaaacattggtacatcttgaatatccaaaatttcaatatcaaccatgtcactaaaatgattagcaataaactttaacagtaaccgattataagacttatcttcaattgaacccgcaattccaactaatttcatcgtcgtcgccctctctataatttttcccaatccatttcacgaacttcttcatacgtcgtcgcgttggcattctttaattttttcgtgatttcgacaaagacttggaaatccttgaacaacccatcgagcttcgtcgctttctgttggtccgttaaattcccctggtcatcaaaggcttgcaatgaatgaccaagcataaattctgaacttggcatgatccgcgcccgtaattctggtgaatccaaaacttgccgcagatgtgcttgagcccgtgatgtgccgagtgccccgtatgaggccccaataatcatgacgggtttgtccacgaagggctggatatggaatgataaccattcgagagcattcagtaatgccgcgggagccgaatgatcatactctggtgtactaataatcacaccatcagcttgttcgatcttatccgccattgcttgcgcctgtgccggaatttcatgattttcgggcttattgaagattggtagacccttgatttccattaattcaatctctgcttgatccgcatagtgggactgcatatattgcaacaacttacggttggtcgactcatctgaattagttccaaccatcgcgataaatttgtgcattgagaacaactccttctatgatcaaatagtcaaatattatataatttcttagtcaataactatattgtagtggatttcactaaagaaagcaaaacaattttaagcgctttcagttttgctatgcaaacaactgaactcactgatattaggcttatccgtgcaatcaagtaaattcagtatccgcgcaacgttgccgcaattatatctgcttaacaaattttttcacaaagctacgacgctacgatcaaatcaatcaaatccgccggggaaattcgaccaaagtaatgggttaagtccaacggtgctagcgccgtcataatcgcctgccgttcatatttcacaccagtcaaccgtgcaacgacgggagcaatcggttctgcaccgaagaaatcgccataaatcgtaactgcttcgatgcgccctgccaccacgtttaactgaaactcgacggtcccagcatcaaaatgccggcgctgcttaactgtaaacgctggtgactgaccgtaaatccaatcccagttggtaaaatattgttggttcagtgctgctacccctgccagtgccgtttcatctaactgatacgtcttagcttgactcaaatcagccacgcccaggatttcacgggccaacgtatcgcgaaattcctcaatcgtcaagtgctgataagccggcgccatgtacggtttcaagttcgtgactcgacttcggaccgacttgatacccttagaggccaacttatcggtcggcaccgtaagagctttcgcaatttgcgtctggtcgacatcatacatcagcgttccatgggagaacatccggccattctcaacgtgcatggcatttcctgagaacttcttgccatcaatcaataaatcattgcggccactcatcgtcgcaccagtggcccccatcgcgtgtaaagcctttagaactggtgctgtgaaccgcttaaagttaccaaaaccgtccccgtcgtccttagtaataaaactaaaactgacatttccaaggtcatcataaaccgctccaccaccagaagttcgccgcgtcaatgtaatgtggtgtgcgtcaacatagtcctggttaatctctgccttgacattttggtaacggccaacaatgatgcagggggcgttaatgtaaaagtatagaatcggttccgtcaaatcggcatgttccatcaagtaagtctcaatggcaagattcgtgcgaatatcatggctggagcttgcaagatagcgcatcgtcacacttcctattctaaataaatccgttgcaaatcattgatttcattgttagttaatttaagctcagtgtgtaaatagtggtttaaattacccgattgtcgtttaatttcggtcatagcggcgtccaaataagccgcatcaactgaccagagggcccgaatactttcgaccgttgcatctgatgcgccctgagcacgtgcttcggccatcgcaccattgatccggccaatcgaagcctgattagttaagagataatcctgcttgatcgtttcaaaatcgactccgagtgcggttaacaggtataccgcccccattccggtccgatcttttcccgcagtgcagtgaaatagtaacgtcgaatcgggttgatcatttgcaagtagattatcaaagaaccggcgatactcgtccttggcatgttgctcgtcggccaccatctgatagacctttagcatgtgcttgaatccactatctggatgcttctccaagttagccgtcatcttgtcagtaccgtcagaattccgcgtttcgtccacattgaacactggtgcgtacacgtacttagcattggcaggaattcgatctggcgcatctaagacttcttgtggtgaacgaaagtcaatatcgtagcggacgccataatcatccagcaaagcttggccggctggcgttaattgatcaagtccaccagtccgaatgaccttatgccacttgatttttcgaccgtctttagtcgagtaaccaccgagttcacggaaattaatgccacctggtacagttaatacacgttgatttgtcatttttgaaaccacctatctgttaacttttcattttctattctaacattatcggtcagtttaacggtgccccaatcaccgaatcagtcgctttatttccaagataattcgttagcaccatcgacaccaaccgacatcaacgcgtgctataatgtaagttacatagccagcgacggcccgtcgaatccagaacacgtttgctgacaaacagcatcacaaccttggaccgattagccataaatttccatactggcactaaataaaaaatattcactgaataatataacggaggatctttcgatgacatttgattatgcacaccaaactgattggcccatgactagtggtcaacatcagtcaccaatcgatattcaaacacaacacgttcagtcttcacagctatccgccatcagctggcgaggcttgtaccaagccaaaacgattacgggcgaagcgacaactttgaaggctagtggaattggtgccgcttatttgaacgaccgcgactttgcctttcaacagattcactttcatacgccggcagaacacttaatcgatgggcaagccgcaccaatcgaatggcatctcgttcatcaaagtgctaccggccagctcgccgtcgtcgccgtttttggacggattggcaagcctaattctagtttacaaggcttacttgaccagttcacagcccaaacgagccatgaactgacaacaccggtcaacttaactgagctcctcccagataccgggactgtctatcactacttgggctcattgacgacgccgccactaagtgaaaccgttgaatggtatgtctgtgccgatactgtcatgattggtgaacaacaattagctgcttatcagcaattatttgccgctaataaccgcaagattcaaccgttaaacgatcggccaatcattgccgaacgtttctaaataattttaatggggtgagctgatgcctaagaaagtaatctggggcttgattgcaagtggcctatttcttttattgatcgtcggtctcggactgacaacacaaatccatcaagataaagtcagtcacgtgattactgcgcaaaaacggccattgatcatgattggaggtagtagcagcacgcggactgactttgatgacatcgtccgttcacttaatgagcaacagcaccatccgctcatcaccctgactgttaaggcgaaccaaaaattggcgtttaaagaaaaacgcgtcgagaacaccaaccttaacgatgccctcatcgtgatctttttcgaagatagcacggactcaacagagaacattatgacccaaacgaacggcttagccaaagctattcgttatttgcaacgtcaccaacatctcaccacggccaacgcactcggttattcaaatggtggcctgatctggagtcgctatctagcaggtttgagctcgtccaaaccattagcagtccacgatttgatgttgattggcaccccattcttgggtactgatgctgcacatcctgataaaacgctctatacaccacttcttgatcacaagaaccaattcaagaaattgcatgcggtcatcaacattgccggtgacactggcgagggtaacgacgatatcgtaccgctcagcagtgtgaacgctggtggcaacttatttatgaataatgttacccgctataccgccatgactgttaaccaaaaatcaattagtcacggtgacctgcttcacgaagcatatgttgcccggctcattcgtcaaaatctgatcaatcaatagtatctttagctttagctgataaaaaactgagccacccttcataatgatgaagtgatggctcagtttttttatgattgatcgtccgctatgactactggcgatcaaactatccaacaattttgtgtcacgagtagcccatacacgggttgcgcagggctcaaaggggcgccacgtcgattatgaattggcagtcgctacaaatcgagctagctcatcggtcgacataccggcactgacacccaccagtaacttaatccgggctttttgtccattcaatccctgacaaaaaatcacacccatttgtttcaattgaacaccgccaccttcataagcatagacatcctgagcgataccgttgaagcaccgggaaaccagtacaaccggaatctgcatgtctaataatttttgcacagctggtaacgtcgccggtggcaaattccccgctcccaatgcttcaatgactacgccatgagtcgtgggttgtgcaatggcgtcaaatagttctggtcccatcccggcatatgctttgatcagaaaaacattatccgtgaccgtttgaatcgggcaaaccgttgaccgtagtaatgattcaaaaaagacaatgcctttattagcgactaacccaatcgggccaaaagtcggtgttctaaaagtggccacgttggtcgtatgcgtcttagtgacgtagcgggccgagtggatttcatcattcataaccactaaaacacctttttcggccgcatccggtgtactagccgtttgaatcgccgtttcgagattatgcagaccatccgacccaatctcattggcggaccgcattgcgccggtaatcacaacggggagctcattcggtaaagtaagatctagaaaatacgccgtttcttctagcgtatccgtaccgtgagtcacaaccaccccatcgaccccttcgtgtgcggccttatcgatccgttgctttaactgcaacatccgtgccggggtgatgtgcggcgacggcacgttaaagacgtcctcagtctctaactcaatatccgtgccaaatgaactctgataattgtctaaaggattttcatctccgggggtcacattgccggattcatcggccgacatcgcaatggtgccaccagtgtgtaataccaaaatcttcttcaagaatactcctcctcatcttttcacgtgcctacgcacatctaacagtaaaattattttaggcttgccatcgcctaattgcaatccaccctcactggttcttcatgacaacttccttagattctcatacaagtgatatcaactaaaaaaactagcaaccattcaaacaatttacaaaacctagcaaccagatcagtacgttttattagcctacatagtgctagtcactcggttagttcacttatcaactagttcgttaatcggttcgtcggttagttaccccttcaggacgaagtcactaacctcagtgcaccttattactcaatttcagtctcggggctaaccgattggccactcgctagacgttgataaatcagcgtttgacgtcccaatgactatcaagtgagaaaataatgattgacactcgcgttagttgcctttatagttagttacataagcaattaaccaaataacaaaccaactaacttaagagaggtatttaaaatgacaaccacaccaatcatgaccgtcagcgacctgcacaaaacgtatggtaaggcgggcagcaaacaatacgaagcgttaaaaggcattaatttcaatgtgcaaccaggggaatttgtcggaatcatgggcgcatctggttcagggaaaaccaccttgctcaatatgctggccacactggaccaaccaactagcggtgaagtaacgattcatcaacaaccgattacacatctgaaaggcaatcaacttgctgatttccgggccaaagagattgggtttatcttccaagatttcaacttattagaaactatgactgcttacgagaatatcgccctaccattgtcgctgcaaaatacgccagtcaaaaagatcaagccagctgtcgaaaaagtcgcacaccaattgggaattgaagaattcctatcaaactatcctaatgaattatctggtggtcaaaagcaacgtgtggcagccgcacgagccttaatcaatgaccccgctattctatttggtgatgaaccaactggtgcccttgattctaagtcagcgcgtgaattactcgacctgttcaccaaaatcaaccaagaacgggctgtctctatcttgctggtgacccatgacccattttcagctagcttctgtcaacgaatcttattcatcaaagatggccggattgggcaagaacttaaacgtggggatttaagccgcagtgatttttatcaacaagtcctcgacaacctagggacgtttgaacagtaagccgaaacagtaaaaggagtcctttaaactatgttaactaaacttgccatgaccggcttcaaacaccgttggcgcgactacctcgttctcttttcaggactgatcatgtctagcgcaatcttctatatgtttgaagcactggccactaaccaagatttcttaaaacaaaatacgagtattagtatggtcggcctcatcttccaatttggttccgtactactcacaatcatcacattagtctacattggctatgctaactcattcttattaagtatgcgtaagcgagactacgggctcttcatgctcgttggtgcacgcaaaagtaagattggtcaattaatttggctggaaacactacttgtcggtatcactgcaaccattgtcggcattcttgtgggaacagccttaactgtcggcgtaagccagattctgattaacagtctaggcctgacgcttcaccattttacagcctggtacacgccagctgccattgcgacactgttactctacgttggattgttcttaattgccggtttattcaacctgctatccctgaccaagacaccagccttgaaattactacacagtaatgatcaacctaaccggccacaactaaaaccagcccgtcaactcatcgaaattgtcgtcggtgtcatttcaattgcaattggttactggtcaatggctaacctgaaaattttgcaactgatgggaattggaattgcgctcgtcacaattgttcttggaacttatctgctgtttaacgctatttttgtctggttaatggtcgcactcaaacgattctcatttgcccaacgtggtttgaatggcttcaccttatcacagctaagctttagaattcgtaattacactaagatgctgtcaattgtcgcaatgctattcgcactagctctcggcgcaattacagttggaatgggctttcacagtcaaattccatcaatggctaatattaataacgcttatgatatgggactggtcaacgctagtaccgctgaaaaagcacaaattgcagcgatgaagcccaagacaacggcgacctatcatttcaaagcaaccaagaaagtcgtttatttccaagctgctgaattcaatcggcaaccattcacgactattcatactcgcaataagaatcaactgacttttaataccgttcataataatgcggctaaattacaaaaatcagaagataattatcaactgatgcagcttcagagtggtgtcatggcaaccgcaacacccgtatttttatcaaaaacggcgtacgcgaaacttgcccagcctgaacagcgactaactgtgtttactaccaacaacgttatcgaacatcgcgttgcattgaacaaactggccaaacatcactttcacactaccagccctgaacaatttggaggacgctatgcgatgtatctaatggttaacggcatgtactccgggctggaatttatgggtatgttcctcggaatcgcctttcttgcaatgctagctagttgcctgatgttcaagattctgtctggtgccgatgctgatcaacaccgttacaagatgctcgataaagttggaaccactagacgccagctcaacggtgccattaacaaagaaattgctgtgctctttattcttcctggaatcgttggtattgtacacgtcttgtttgggttacaaatgttcaaaatcataatggttacctcaccatataccggaatttggttaccattcttgatttttgccggtctctacctactttactatctcattacgatcaccatctatcggcgaatcgttttacaataacctttcggaggagggaaaaatcatggtatactttggattagtcgctttattaatcgttattacaccattacaccgttacgtgctcgcaagtcgtcgtcaattctggttaggggcgctcatgccgcttctgtggctgagcgttaacttcggtttagccacccagattatctttgaacatcaagacattctactggccgtactgggcaccctcctcctactctctagttggattgctgcccggatcgatcgtaccgaacgacaactgcaccagccgcaacaaaaggccacaacgaaatagggcaatcactgcaatgaggtgaataaaatgcagttcaactttaatagcacggaaccaatctacttgcaggttgccgaccaaattgaagaagctatctttacggaaaccttcgctgaaggtgaacaaattccttcgacaaccgagatttctaaagaatttcatattaatcctgcgaccgtgcttaagggcatgaatattctagttgatgcccaattgattgaaaaacggcgtggggtcgggatgtttgtcatcgccggtgcacaacaacgaatcgttgaaaagcgccgggatcagttctacaccgactacgttaaaaaactagtcgctgaagcacaaaagctccacattacgcaagatgaattagctaaattaattgaacgggggttttccgaatcatgagtattcaagttcaggctgtccagcaggcctttcgcggtcaaaccgtcctggataatcttaacctaacgatcaaaccaaacacgatttacggtttgctaggccgcaatggtgctggtaaaagtaccttgctgaacattatcagcaatcgtatctttgctgacagcggaacggtcaccatggacaacgaatccatgtgtgataacgaccgcacgttaggaaaggtttacttgatgagtgaagttaacctctattctgagcgttcccgggtcaaacaactgtttaaaaccaccgcactactctatggtgattttaatgacacttatgctaaaaaactagcacaaacctttggcctcgatttaaacgcgcgatttggcaaattatcgacgggttaccgaacaatttttaaactgattattgcgttatgtgtaccggctgaatacatctttttagatgaaccagtcctcggtctggatgctaatcaccgcgaaattttctatcaagaactgattgaaacctatagtgaccatccccgcacattcgtgatttcgactcatctcattgaagaaattacgaacttgattgaacatgtctttgtgctggaccatcatcatattattgttgatggtgatgtcaccgacatcctagggcaatcttacgcggtaactggtccacaaactgatgtcagcacttatacggatggtttaaatattatcggcaaggatcatcttggcggaattacggcccactacgtttacgggccattagataacgaccgaccaattcctgatacggtcacggtcgagcatctggacctacaaaaactatttgttaacctgactaataccaaggaggaggccgccgctcatgtcaattaaggttcgcaacaccacccgttatttattaacggaacaattgaaaatgacggggtggtcggtactcgctttattcgtcgtattcggaatactaccgctactatttgcagttattacgggtaatattcggcagtattctccacttggtaattttgctagcctaagcctcgggccactcttcttcatgcttatctttattgtggggtcactcacttacgacaactttaagctcttaatccaaaatgggatttcccgacaaacctactttcaagctcgagtattcgcattactcatgcttagtggtttgcttgtcatcatcaatgccatttattactacggtattcatgctccgtatttacactggagcaccaacaccgcgttgatgagaacgggctattcgctgtatagccatgcgctgggaagtcaggtctggctaaacattttagctagcttatgctttaactggattttctacattggtgttggccttaccggcatcgcttgtgggaccttactcgcgttatttggtaaatgggccaaaacgattttaatcattggcacccccatcattggcatgcttattatttggataatggtcatcattatgactcgcaatcaatcgaattataattacacgggacttgaaaacttcttgaaatttattattggttatcccagccacggtgaagcgacaactggttactttaacccaaccatgccattcatcacaatgctggtaggttgcggtatcatcggtggtctcgcttatctgttcaaccgtaagttaagaatcagaaattaagctgataatctaaaaaatgaagcaggtcgtgaagttattaacttcacgacctgcttcattttttaatggttaatacaaacgtcacaccattcgagaagtggttttcccactaacgctacttttcaacctgcgtattttgcaaatccgtcttaaccacgattacatcagtcaacgcattacgctgcacatacgttgtaaccgagccttccagcacgcgttcaacggcatttaacccggttgcccccatcatgatcaagtcattatgatgatccttgacgaagtcctgtgaaataattggtttcggacttcccattcgaatgtggaaggcaatgtccgtaaagccatcctttttgacttgatcaaccgtttcttttaaataagcttcagaatcctgaaccaattgatacgtaatatcaccatccgccaaaccagctaaattatacccaaactgaccgggatcaatgactgctaacacgtcgatatgtgcctcattacgtttagcgactgcaactgctttatcaagcgcaatctcagcttgttgtgagccatcgaggggaactaaaatattcgaatattcttgtaccattgacgtcacgccctttccatctgttaattctattttaccatttatcagcgttggttgcgttatcatttatataaactaactaccagttatgcacagcagctcgccggctagcagtgtcgggtttacataatatttacaacaacgacatctgatatttacagttaccccttacaattggagttaatccacttgggggtgaatagtatgctttctttaggtattcgaccaggcctaatcgccagccatacaattgtaatcaacgatgccctttcatatcaaatccggttaagcaaattgcgtctcggacccgatgtctatcggctagacatccgtgcaaccactacactgggccgcttgaccgtgtcccacgcacattaccataactttgccacggcccagcaagcctttaatcatcagcgccaccaacttgaatcgcactaaaaatatccaacacgcagccatttaattatgataggatggtacctagtaataatcagctaaagtgagggtattcatctgtgggacaacttatcaaacaactctggcaacgctatcaaagcgtcctttcctatttaatctttgggggcttaaccaccctaattaatattattgtttttggaattttcaaccaattctggccctactggatagccaatacgattgcctggctcatctcagtgctattcgcctatatcacgaataaaatttgggtatttgactcacaaacacctactttccgtgctgttttaattgaaatgacatcattcttcggattccgcctactcagttactttattgaccaggggattatgattgtcggtatttcggttctgcacggaaacgaccttatcgtcaaattaattgatcaaattattgtggtattactcaattggttcttcagtaaactatttattttcaaggaccgtggtcattaaagcgaaccaacttaaacatcaaaacaagcgtcgtaggaatgtccgaaaattcctgcgacgcttattttattcataataattaccgccccatctttttttctgatacttaacttagctactattttagcaaccatattttcacccaaactggcgttgcaccgtatgtaacgtcgctaactttgtgaccacatcatcaatattgaccccatcccaattataaaaaatatattggcgaccacagcgcatcttaatcaccaaatgacgtgctgatgaagcataaccattgcgaacttcggcctgatccgtcgtcaatgcatagtattgaatgtcatccgtatttaaagctaactctccaattcgtatcatgacttgttgactgacctcattcggcggtcgaactgacaaacaagtcccatcatggtgctgataccgtaactctaccgcaactaaaccggccgcggttagctgcggtctaaaataaaactccgcgccaatatgcaacgcacttgacggccaaactgcggttagccgaaatttaaaatgccggccatgaaaatcagtcaggatgccttggtcgtaatctggttgcattaccgtaatatgcccaatcatgacgattcactcccttcacttagttattgataatgtatcacgcttcacaagcatagttgtgtttaaaacccataatcagtcgtttttaccattttttattaaaatagtaattaaattatccttactcatactaatatttgagttaaccaactttattgatcggaggtcccgttttgatgacatttacaaatcaagaaactgactatcttatgaacctactaaccaaccagttaatggccctactaagccgcgtcacgcgctggcagacgcacagtctgagtcaacaccaatataaccaacaagtacacgaaacgctccaacccgaactgaacatgctcacgcaaatcactgctaaactccagggacaagcccgtgacaaaactcagctaggggccattcaaactggtttgaagaaacttcaagttgccaccacctatcagctaactgccgaccaacttgcacacgctaatgaacgccggctgaatcgccgataccgcgattaacttttacaacatcagcatatttaccaggagattcaaaactatttcgcaatccttaacagaaaattcaaatttcaatcacgagttagctactttttctcggtacaatggttttatcaactcatacaaccacttgactgaaggagggcttccatgttcttaattgtttactgtacgttcgctattgcagtttttttctggatattcggttacgttaaaaccgccgtcatcattggtatactggcactgagcttgattgcttactccttcattcgccgagagattactcgacgacgtttgctcaagcgacgcacggttaccaataaaagtcgttaaaaaaattccaacacgccggtgtcggaattttttggttatttttgcatttgtgataaacaagtgacgatccgctgagccgcctcacgcacattttgcggattagtcgctaagttcaagcgaacaaacccctgatcatcaggactaaaccactcaccaaagtcaactgcgagctgacattgatcttgaataaacgctttcgttgcagctggctgaacgtacgcgcgtaaatctagccacgtcaaatacgtcccctgcaaatcggctaaaaccaacttaggcgcgtgggcggcaaaggtggtgcataaataatgataattatcacggacgattgccaaaatctggtctaaccaggccgcgcccgattcataagccgtttggccggcaacctggcctaagacgctgatctcagtctggctgaagcgcccgatttgtgcatcatagcgttgtcgtaattttggattaggaattactagatgtgagttcaaaagcgccgccagattaaacgtcttagacggtgcattgacgacaatcacccggttactaaaccgcccattggctaccgttaacgccgatttgaacggatggttggtccgatcaatttctaaatcctggtgaatttcatctgaaataacaagcacatgatactgttcacataatgctaacagccgtgtctcttcatcttcagaccagatccgccccacaggattatgtggcgaacattgaatgaacaaccgcacctcgttcgccttaatttgctgttccacatcttcaaagtcaatcgtatagtgaccacgatcattgcgtaactcagatgtgaccagctgacgatgattatcccgcaccgcgttgaaaaatggatagtacacgggcgtcagaatcaaaacgccatcacctggttgcgttaaaatattaacgagcgcgtacaacgaattgaccacgccactaccaaatcgaatccaatcgcgtttcaatgtcagaccatggcgtgcctgttcccaatcgataaaggcttgataataacgatcaggcgtaatggaataaccataaatgccatgcgccactcgttcttgtagtgcttgcgtaacttgttctggcactttgaattccatgtcagcgacccacattgccaacaaatcaggattgccataccgagcttgtagtgcgtcccacttcaatgaatccgtatgctggcgcgttgttgcgtacttcttaataaatgctgattgttccatcttaaaggccttctttctcaacaaaaaaacttcgtccttaacttactaaggacgaagtttatactccgcggtaccacctattattacagtcttgctgtcgctcacgcaacgtactcgttacgttcaacccaattatcggtggtcaatccgggctaacagcatcaaccattagccaactccgagttcatcttcacaataagctgatggtcaaattacaccactactttgactcgctaggcatcaacttattgttactcttctcatcaacatttaatcttcacgttgcttctaagttacaacgtgaagattaaaaagtcaacaacgtctttaaaattgcgcttgctctaaaacctggtagccatcgattcgttggtcagcggtaggaaacgccccggtctgtaagaaacgcttggcctgcatgacccgcggcgaactattcgaccaatttaattgatcaagtggcactcgagcggcccccgccgacattgattcggtgtaatgcggtcgtttgagcaacaaatggccccccaccggttccagtaaataataaatattaattaacgttgctggcaattctaatgttgttaaggctggaatcgtaagctggacggtcccaagttgctttgaaataacagtttgtagtcctgtttgaagttgtgcaatctgactaacggcctcactcaacgtggcccgtgtcgtcactggtgcggttactaaatcataacggttcttgaacggcccggttaaggatttattaaggaccatggccgtcgaatcaccaatgataccacaaacaaatagtggactaattgctggttcgttaatcatcaatcttttccttctctcagtcatacgattaaatagataaattaattagcctataaaaatataacagttacattttaccttagaattatgataaggttcctaaaaaaagcatgcgaatatgaatatttaacaacttttaataattctatgaaaaaaaccgaatcttggctactaaaacgcacaaggttcgattactttttttgttatttagttagattgcacatcggtcgtattaataaatgactgggctggcacacgaattaaccaccgcgtcatggcttgatgccccacatggacacctaagccattccagaatgacggctgataagtggctgtcagcttcactgcgtaggctttttcgtgctgccggtcttctttaaccagctgcttttgtgaccacggaataccagcatccgccactttaacttgcgaaagattagtcaccacggtcgccttgttacttgaaacagtatatttcgcaccattaacccagtaattataaatatgcacgggtttttgggtcgtgccccgatccaccgcgacatagtaggaaccattagtcccaactcgcaaaaccagtggttcaacttgatacgttaccttaacgtccttagcatctgacaggtcgacctggtgattgaaagtcacgtatcccatgccaactagtaatccgagactaacgattaattcaacggtggtaatgataagatttccccactcaaacgtatgcttacgttccacgatcatcttgatgcgtcgtacgcgaatatgatgaaatacccacacgactaacgccaaaacaatgatccacgcaatgatcccaatccaattccatgcagaagtcattgattgccaaccctttctcaattacattattatgttctaattgtaaataatccaaccttaaataacaagtaatccagcaaattcaacacaatcattcagaagcagattgtgaaaataatcactgaaacggtgccaatgtaatcgaattcatggtaaaataaagttattaacttgtagaaagaaggagtacacatgatcgcgtcactaatttattgggtcgtcgttgttggcttgattgtttggggtgtttggatggccatcctttccgcatattgggccagccaaaaacaaaacggcaacattttctttattgcaattatgaatacattaggtgccttggccggcctcttagtatggtgggtcttcaacaatcaagactggcagtactactggttatccagcaccgttaagacaaccaacctcttaggcatcgtcctaatctgctacgttgtcttgattgtcatcgaattcatccaaggccggggcatcaagcctgagacagctaaataatgattattttaaacgccaagcaagttgctaggcgttttttattgtcaaatgcggcaacaatcttgctcttcagtgtttgttacggtgataacatttgatttgtcatgctgcatgcttcatcatgattaataaaaaaaacgattctcaaagacattgagaatcgttttttataagcgactgtcctaatggcggctatcggtcttgaagatttcaactgggaaacacacagaacgctccaccagtcgacttgtgacactacttcacaactaagccacggttaattcaaagcctcccggtgccatctcatttgcggtaatacccgctgttaagattggcgatacgccacttactgttgagactgcctgtgcacctaaattaaagcggccttgaatcgtctgttcaacatccgtccgcgttaagattaagcagtgaccatcaatcgtccatgtcaattggctagttgctaaaaagtcggcctgttgccggcgaaacttgatcaaacgcgtgacaaattgtcgaacttgttgttcttgctcgtctggttgccagttcatgcaccgacgattgtcagggtcggcaccaccggccatggccacttccgttccataataaatacacgggctccccggcaatagcatcagtagcgtgagtgcagatttaaatttagttaactgaccatgcaacgtggtcagtagccgtggcgtatcatgcgtatccaacgcgttgaacatcgcctgttgattaggttgacgatacatcattaattccagattggttttaccaacgtaatcttcaaggttgagttgaccattaaacaacgccagaattggttgtgtcagtggataattcataaccgcgttaaactggccgttaccgactaacgattgactactatgccaagactcacctaataggtacatatcaggtttgattgcccgcaaggcaccacataacgctcgccagaaaccatggtcgacctcatcagcaacatcaaaacgccaagcgtcaatcccgaattgttcgatccaatatttggtcacatcaatcaagtaagcttgtaccgcggggttctgggtgttaactttcggcatcgctgctcccgtcgcaaaggtttcataattaagccgcttcgtcttcggatcacgtcccaccggccagccatgaatatgaaaccaatcagcaaaccgtgactgctcgccatttttaatcacatcttgccactgtggtgactgctcgccaaaatgattaaagacggcgtctaacatcacgcgcataccgcgcgcatgggcgccatcgactagcgcctgaaaatcggctttcgtaccaaagtggggatcgatttcaaaatgatcgatcgtatcatacttatgattagatggtgacgtgaaaatgggacacaagtacaggccattgacccccagtgcagccaaatcatctaaatgcgctgtaattccgggcaaatccccaccataaaatgaatcacggtgaacacgcccagcaccccacggttgaacattagccgggtcattttgccgcacaccatttgcaaaccgttcaggaaagatctggtaccagaccgtctccttaacccatgccggtggcagctccgcatcactgacgtgcatatatggcatgtgaaaatagttgcccactgtttgccagttagtggcaacgtcgtcaaagaagccaccctcaccatagccaaccgtcgcaccggtcgtatccgtgatcagaaaggcatagaccacccggttagtcggtacggtcagcgtcgtctgccagtactggttgccctgcgtcgctaatccgggctgcattatccgccgctctagcgctgttgttccttcttgccataagtaagaatcggcaaataaaatctccacttgggcaacatcgtcacgcgcagtttgtagtcgtacctgtagttgatgtgcggctaagacggctatatcttcactttcagggcggtgcctaattccagctagttgcattgtaagatctccttttatgtaaacgattacattattaactagaccatttacgtcaattatcctcatgattttggtgaaaacgtccccgttcgcctcgattttagtgtatcatttagtcaaaatcagttgaaaggacgttatccatgaaaacactttatcgcagtacccgcgaaactgcaagtcacaccatgacgtcatcacaagccgtacttcaaggcctgacgccggatggtggtctctttgtgcccgtaacgctaccgaccgctaattttgacttcgaccagctcgccacgatgagctaccaagaagttgcttacgaggtccttaaactcttcttcacggattataccgctgatgaattacacgcctgcattgacgcggcttatggtgatcagtttgatgactcccaaattgcgccggtcaccaagcatggtcagcagtattaccttgaactttttcatggaccgaccattgcattcaaagacttggcccttcaaatcctaccgcatttgatgacaacggcagttaaaaagaaccatttacaagccgaagtcgttattttagcggccacctcgggcgatactggtaaagctgccatggccgggtttgccaatgttgatcagactcgcatcatcgtcttctatccaaaagatggtgtcagcgcaatccaaaaacagcagatggtgacccaaaccggagccaatactagtgttgttgcgatcaatggtaacttcgatgaggcccaaacaacggttaaaaaactgttaaacgaccaccaactacacgcggaattagccgcccaccagttccaattttcaagcgctaattccatcaatattggtcgtttattcccacaagtggcctattatgtctacacctacgctcaacttatcaagcaggggcaaatcaagaacggtgatgagattaactttagtgttccaactgggaactttggggatattttagctggctactatgccaaacaactgggcacgcccattcataaactgatctgtgcttccaatcgcaataacgttctcaccgatttctttaataccgggacttatgataaaaaccgtgaattcttcttgacgagttcaccgtccatggacatcttagtctcaagtaacttggaacggctcctcttctacttgacaggatcagacgccacggcgactgctaaactaatgactgatttgcaaacgaccggccgttatacgattacaccggcaatgcgtgccaacttagctgatttttgggccggcttcgtgactgaaagccaagatcaagctgaaattcatcacctgaaccatgcccatcactacacaatcgatccacatacggccgtggcctcggcggttgccaaacagtatcaagccgcaaccagagatcagcggcccatggtggttgtttcaaccgctagtccgtataaattcccacaggccgtcctaacggcaattactggtgagcttagtgcggtagatggcctagccgcagttgatcagttacatgagttgattcaaacgcccattccagcaacggtcacagccctccgtactgcgcccgtgcgccataagcgggttgcggatgttgatgatatgggaacgaccattaaaacaattttaaatcttaactagaaagtgtgaccaagatgattacgaccattgcgttagacctagataatacgttactaacttctgagaagacgatttctccgcgaactgaagcagttctcaaacagctgcattcggccggcaaacggatcgtactgtgtactgggcgaccaattaaggcgattcaaccatacttacaacaacttgaactcaaccaaccaactgactacgcgattacctttaatggtgggctcgttcagcaaaacacgactggtgacgtccttgctcgtactagtgtgaccaaacaagatttacaacccttatttgagcaagcccagcgcgatcatttctacttagacgtgattgatttgaagcaagtctactccattacggatctaggcaagtcaccgtacgaagaattcttgcaaggcttaatgccatttaagaatgttcgttttgccgacctgcctgctgatgatctattcggtaaagtcgttagtgctggtcaagatgctaaaacagtccaggccaaattaccaagtcaaattaccgatttcttccacgtggtcccatcccggcggactttgttggaattcttaccaccgcatactgataaggccagtggtttgaaacaactcctcggtcactttaatgaagactatgacaacttgatggcctttggggacgaagaaaacgacctaggaatgctaaccgccgccaaagttggcgtagcgatggcgaatgcgattcctgcggtcaaggctgcaaccacccatgccaccctgagtaatgacgcggacggggtcgccgttttcctagaaaattacttcaactgatccccaactgaagcctgtaacgggcttcttttttagcacaaccactcaaaatcaaactaacgaggtatcccatgcaagatccccgcattatcccagcagaattaacgactggcgcttttttcgatattttagcagatgaggaccacagcttaagttatattcaggttagtgaagaagacgtgagtcaccagcacatcgagcaccccatgctggatcacgtgcacttcgaaaatgtccggtttacggccagtcaatttgaacggcttgacttgaccgatgccatctttatcaattgtgacttttctaattgccagtttgaaaaagccagctggctacgcgttcaattcaaagattgtaagctcgtcggtgtcgacttgaacgaggctgccctcaataacgtcgcctttgaccactgtcagctcgacttagccatgctgtgcgacatgcggttcaaaaccgtgacctttgatcactgtcggctgaatggggccagctttatgaacaatcgactaacgaccgtcaagtttaacgaaaccagccttgaccaagtcgctttcaacgataccgccctcaaaaatattgacctaagcacctgtcaattcgagcgtctcgaacttgatactgccgcagcacgcggtatgatcgtcaatattgatcaggctgcttatttggctgctgctttaaacggcatcaaagttaaaccctgataccggtggaacagtcaccgtatgagtgaccaactcacaatgccaaggacgattaagctgctggctggtaaatcttctaataacactgcacgtatctgtcagaatacttttcacgcgctgaacacaaaaataccacctccgtcaggtaacaacctgcgaaggtggtattttgtcgttcatcatgacaattcgaattgcgccccggtgtaaccagtgcggtcggccgccgtgattggtcgaataacttggcaagggttgccagccgcaatcacgttagctggaatatcgtgggttaccacgctcccaccaccaataatcgtgttagcaccaatggtcactcctggtaatacggtgacgttagcggctagccaacaaccatcaccaattgtgattggtcgggcgatgcagccgcccctaattcgttcggttgcatcaaacaagtggttgctcgtgtaaaggccgacttttggccccaacaagacctgactgccgatcgtaattggcgccccatctaacattacacaatcatagttggcataaaagttatcacctagatgaatgttccgtccaaattcaacgcgaaaattaggatttacaaatggcttgcgaccagctgaaccaaccaattgtcgcaataaagtttctttagtctctggatcagcagtcgcattgaccgcgttcgttgtcaacgtcgcttggtcacgcaacgccgttagttctgcatccgtatctcgatacggctgaccagtcgccatatacgcaaacttctcatctaaattcattccgcaccccacttctatcgaataaaattcaagtaccatgttattgcgcagattccttgtgctgaacgaatctggccattctttaataggtcaatcactttactgagcgggacaagttgcgtattcacgtattcgtccgcgtcaaaatgtcgttcgccatgttcttgcggatcaatgtgagtcaaaatcaagctgaccgtttcgtccgtgaaaccttccgacgagctaatttgcgtcataatttgtggttcatgggcaatgtagcccgtctcctcttgtaattcacgggccgcggccgttaacggatcttcccccgcattaatgaggccagcaggtaaactaatcgtctcggcattgcgaccgacccggtactctgaacctagcacgacttgatcatccgcagtgatggctaaaatcgtgacggcgttcccatgctgaatcaaatcgcgttttacttctaatccatcaggtgtttgaatcgtttgtttgaccaaatcaaaaatcggcccatgatacaccggtgtcgttgataggaccttaccaggccggccaactttctcaaataaatctgccatacacattcactactccttaatctatctcaaatccggtacaccatccggcagcatcttacgaatgccacccgcggggtctggcacgtcaccttgatatcgcggtatcagatggagatgacaatgcattacggtttggcccgcagccggatcaacgttaatgccaatattatagccatccggatgattgtgcgcatctaggtacgcttttgcttgggtcagtaaggcgagcatcgcattcctggtcgccgtgggcacatcaaaatacgtggcataatgtgctttcggaataatcaacaaatgccccggactcaccggctttttatcgaagaaggccgctgctaggtcattctccaaaatatacggcaacggctgacaaaaaatacaagccataccaaagtccccttcctattttgctaaccaaccaccatcaattggaaccaccgtcccatgaatataatcagcgtgctgactcgctaagaatagcgtcagatctgcaacttcctgcggttgggcccaccgttttgcgggcgtctcactggcaacccatttcgccatcttaccatcgccagcaaaatcagcggcattcatcggggtatcgatagcccccggcgcaatgcagttggcgcgaattccctgagccgcatagtccaagtcaagttgtttcgtataaccaatgatggcgtgtttggctgcggtatacgctgcgccgcctccgccacccaccagtccagcgatcgatgccatattcacgaaaacgccgtgttgtgcggctaacattgcaggtagcaccgcattagtcacgataaactggcttgtcagatccgtcgccaaaatatcttgccacgttttcagatccgttgctaaagttggttgataaccgtctaacttaccggccgtattgcacacgacggttggcttgccgagtacgttaactcctgatttaatcgccgcgacgagcgcattagtgtcggtcacatcagcaatttcatagcgcagggctgacgtcgttactagcgctgatggctgtggttgccgatcaatggcaatcacgtcagccccctgggctaggaaactctggacctgggctaagccaatcccggaggcagctccagtaaccaagacagtctgtccacgatattcatcaaattgcattagtcaaccaactgccagtccgtcgctaaaatatcacaatctgttggtgaccacatactataggcttcatcggccgttttgattaaaaagtacgggttcagcgggtcgccgttgaaagtggttgccgtctgtaattcgacgaacaattcggtcccttcccaaccagtccgaacagcgcgcttaccagcttttaattcaggtaaaatagcttcaaatgtcatcacgatacctccaattattaatacccaaatcgtatcataatcccgcgtggagtgacaggcaaaaattggtaccaacaaattgtctattttactggtacggaccaattatttgtgcgataatgtaagcgaatacagaaactaattattatttggaggaattttaaatgagtaaactcggtgtttccgtttatcccgaacgatcaacctttgaaaaggatgcggcgtacctcgatttagccgcaaaatatggctatcaacgggtattcacttcactgcttgaaatcaaaggggaccaagccgcagtggttgccaactttaaaaaagtgatcacttacgcgaaccaattaggcttgcaagtaatggtcgacgtcaatcctgacctcttcaaacaacttggcgtgtcctatgacgacttgtcattcttccacgacctcggtgcctggggtgtccgcctcgacctaggattcactggtcaagaagaagcccggatgacgcacaacgaattcggcattaagattgaagtcaacatgtccaaagggactcactatgttgacacgattatggattattcacctgaaaaagataacttactaggctcacataacttctacccacaacaatacactggtcttggttatgattattttgttcagacttctgaacaataccgtcagtatggcatcaacaccgccgcgtttgtttcatcaaatgatgcgacttatgggccttggcccatgcaagacgggttatgtacccttgaagatcatcgggggttaccgattgcggcacaagttcaacatttgaaaatgacggggctgatcgacgacgttttaattggtaacgcctacgcgagtgaagccgaactaaaagcggctgctgaagtgttctttagtccttacccactgctacacgtcgaaaccgttgctgatctatcggcagttgaagaaaaagtactctttgcgcaaccacagacttatcgcggtgatttttcagattacgtcattcgttcttctcagacccgggtcatctacaaagacgaagcctttcctgctcatcacctagatgccattcataccggtgatgtcttgatcgataacgatgagtttgggcaatacaaaggtgaattgcagattgcacgccaaaatcttgaaaatactggccgaatcaatgtggttggtcatattactaagagtgacttaccttgccttaacttgctacaaccatgggccgactttaaatttgtcgctgccaaatagtactcaacgaatggaggggtcgcagtaatgacaactgattaccgtttaactagcgatgctgaccgcgaagctttctaccaactttaccaatacgcgttcaataatcacgatacccccgcgcggcggcgatttttcatggatcgctaccaacatggctggatctacggccgtcacgatcatggtcaactggttagtgggctatacagtctgccactagcagtcaactttcatggcgtcacctaccggatgaatggtattggcgatgtgatgagtgcgcctgaatatgccggtcagggtggcgcgggacagctgttaacgacggcgctgacagaaatggcagccaaccacgtgacgctgtcctaccttgcccccttcgcgtacggttactatcgtcgttttggctatgaacacgtcttcgaccacgcgcaccaagtcatggccgctccagacctaccacgtgtcaaaccgacggactggtctggtacgatcacccgctatggcaatgacgggctggcccaaatcaacgatttttatgcacgacaaccgcaaaatcagcgtggtggtctgattcgaccagcctggtggcaacattacctgactctcaaacatcattggtcggtcgcaatttaccgcaatgcggctgccaatatcgagggctatttgatctatgaacggcaggccactaactttgcgattcaagaatgggtgactagcacgccgaccgctttcgaacgattggctaactttatcactaagcatggcaccacctttgaaacgtttagttatgatagcccaagtgcgaccaacggcttggacctactagccgacccataccgtttaaaagtgactgtccagccgtacatgatggcccgcattgttgatttatatgactttatcaagcgctatccgtttctcacggacatccaaccaattcgcctagcagtcagtgacgctaccctccctgctaatcaaggaatctggtcattgacgcggcacaacgggcaagtaacgctcaatcgggttagcgaccaattaactggaccggctgacattcagttaacgattcagcaattaaccactgcttgctttggcacccagagcttagcccgggcgtaccaacacggattaatcaccggtgatgtgaatgcgatcaaccgacttgacactagtctagtgaaagaacgaccagcacttattgactacttttaagtgcttgatttagataagtagcatgactgactcaaagtgggccgccagaatgattattctggcggcccacttttttaaagattcgtatttcccgttcaaacagtttttgtcacatatccagtatttttaacaataagattacagctaattcttgggacgtttcttttacggcaaatagtcattctcatcttagtctattcaaaaaagatgtttgaagatccgactagatctccaaacatctttttactgacattatcctggttaatcaccagcatcgtgcgtaaataaaactaacgaatatcaattgattaccaatgtaatattaaccatgtcttgacattaattttcatacaaataacccgcatcccgtaaagctgccttgatggctgttaattgttccggggtctgataagcaaccgtatggctatggacgccatctgttaattctgataataaatggccttgtaatttcttgagccggcccataaacagattaacatcaccaactgagcgaatctctaattcaccccggagccggccatacaatgggtgttcgacttcaacatccttgattatgccccctgcgtgaatgatcaaggccatttcctgcatcgcttcgtttggaaaatgacggcaaactaggacagcagttggctgatccgctttttctaattcatacccttgaagagtagcaacaatggccgttccgtgagccctcaataatgaaatatccccaacaatggtctgacgactaacgttaaactgcttcgctagcgttgttgcacttacggggacctgcgtttgcgataattttgatcgaatttgttcacgccgttctgatcctgtcatgactcacccttcttactctttcaatagaatcattctaccagaaaaccagtagaatagctttcatcaaatactaaattatgataaactaagttcatttaccataggtgtcaagacacctaaatcttaataacgggattgattagcaatgcgcaatttatctttattaaccgacttatacgaactctcaatggcaaatggatttcatcacgacttacctcagaccaacgccaccttcgaccttttttatcgccgggttcctgacaatggtagctttgtcattgcggccggcctccagcaagttgtcgaagctttacaagattttcattttaccaacagtgacctcgactacttccgtcaacttaacctatgggatgaatccttcttagccatgctggcaaattttaagttaacttgccaaattaaggcactaccagaaggaaccccggtctttcctcgtgaaccactattgacaatcactggaccacttgagcaagcgcaattacttgaaacactcgtcttaaatatcgtcaatcaccaatcactgattgccactaaagctcgtcgactgagttatgctgcggcaggacgtccaattatggaattcggtgcgcgccgtgcgcaaggcccggacagcgcgctttacggcacccgggcagccattattggtggcgccaatagtacttcaaacgttctcgctgcgaagctgtttgatattcccgttgctggtaccatggcccacagttggattgaggccttcccggatgaactaacggcgtttcgcaagtgggccgaacaatatcctgacaatagtgcgctactagtcgatacttatgacgtgcttaactctgggattcctaacgcggtgacggtctttaaggagctacgagcagctgggcatgaacccgtcggtattcgaatcgattcgggggacgtcacgactttatcacaagctgcccggacacaattggacgcggctggctttcccaatgccaaaatcactatttctaacgcattggatgaacacatcattacttcgctgttgcacgaaggcgcaccgatcgataattttggtgtcggtgaaaagctcatcactagcgcgtccgcaccggttctaagtggcgtctacaagcttgcggcaactgagagcaatggtcagagcacccccaagatcaaggtcagtgccagtcgcgaaaaactaacgattcctggtgataagcaagtctatcgtctgtacgaaccaggaactcagcgggcctttgctgacttgattgcactagctaccgagacgatcgtcgatgcaaccagcctaaccgtcgtcaacagtgacccactcagtgtcgaccgccaacagcgactcacccattttgaagcccggcccttactcgcgccggtagatttgtccaacaccacgtcaattccggttacaaccattcaggcaacgacccaggctaaacttgccgagctcccacgaacaacccagcggctcgtcaacccagatctttacccggtctacatgacaaccacactcagccagttacaaactagtttgttgaataaaatgacgatactagcagattaacaaacgaacacgcgtagcaacgactaaagccacttctgatcagcgttcaaatgaccgcttagtacagaagtggctttagtttataacaagtaacagttagctcactgaccagtaatttgatcatgttcacccggggtcaatattttggtcatcaccgtaatcaaatacgcttgttcgcgctcaatttcagttcccggcaattccagcattaaccgcgctaggtaaccgaatagctgcgataacaaactttgcagtatcaaatcattcggccaatccacaatcaaatgatctgcttttagttgatttatgacacttcccatctgcttgaccatcttaggcgcaatctggctaagaatctgttcgcgtcgttcggcgtcaaaagctgccatttcaaaaatgacctttaactctttcacgttagctttagcaaatgcaactcggtccgtaaaaattgctgtgacgaatgcctgtagactgggataacgctgccgtaattcatcctctgaaaaatcactcgctaaaattggcacaatgtgtgcggcaattggtgctaagatggcatcccgtaaggcagccttagtcttataccgccgatagaccgtcccctccgcaacgccggcccgttgtgcaatatcactagtactagtctggtcaaaacccttttcagcaaacaaatcgagacttgcctggaggatggcccgttgcttaggtgtaatcgtttcattctgacttagatcatgttgaaaataatcccgtatccgtggtcgttccatatcctcacaccttccgataacgtttcattccaacaatattcaacattgttagtacgaccataaaccctactaatattaacaaattgacaccaatatcgccaagcccagcaccctttgtcacaacagccgtcaacgcattagcaccatagtataacggcatgatgtgggcaattgcttgcaaccaactcgccatgccatcgactggaatcaacccagcaaaaaagatttgtggtacaacaatcagtggaataaactgaatcatttgaaattctgagttagcaaaggtggaaataaagatacccaaggtcaaagccactaacgctaataataagttagtcagaaagaccagccaaatactaccaactaagtgaatcttgaagaccgtaattgcaaaaacaacggtcaggacagtctgaatgatggcaaagcccccataaccaattagatagcccataataatttcactccgtcgaattggagttgcaagtagccggcttagggttccagtagtgcgctcattcaaaagtgaaacgccagaaatcaagaacacaaagaagaagacaaagaaaccgagaaagattggcaaaaagttttcaaagaacgttgaatcactactaccataaatataatgactgctagtggtataggtcgtcgtttgtgattgactatttgttggcgccgcagcactcgctgtagcctgcctcaattgcttttgaattttagccgcagcagcagtattcccacttgcctgtgcttgggccaaggcagtctttagcttgctaaccgttgcctgtttttgcgccgcggtcaacttttgtagtgccacctgttgcgtttgcaacacctttttttgtgctttagtagccgtgaccaacgtttgaatttttaatttgaccagtccgctttgcaaagaagctttgatcaatgacgtattggtcggattactattagaatacgtgatcgttaagttgccatctttttgcgtcaaatatccatccaaatcatgctgcttaatcatcgcttttgcctggttactactgtaatggtgaatatcgacatgcttcgtattaatggctttgaccacctgatgatcaacattgtgaacacctaaagtcgccacttgagtcgtgttattttgaaacaaaaaatacatcaacgccataattaagagtggtgccaaaaacatcagcgccaaggtacgcttatcacgtaacatttgcttaaaaactcgtctaacgattgccatcgttcgcatcttgcatccgccccgctttcaaaaagacctgttcgatcgtatctactgcatactgttgtttcagtgccgcgggtgtcccctcagcaagcgcaatcccgtgccgaatcaacatgagataatcacaccgttctgcttcgtccatgacatgcgttgtcacgagcatcgacttaccagtatccttgagcttatttagttcggtccaaatttgttgccgtaattctggatcaatcccaacggtcggttcatctaaaatcaataattggggatcctgaatcagggcgattgccaacgacaagcgccgtttcatcccacccgaatagccactgacccgcttgtctaattgggacgtcaagtcaactaatccggctgcataatcaatcatctgtgctaactttatttttggaacactcattaattgcccaaaaaaggtcaggttttcacgggccgttagtgtctcatacaaggcgtcactttgggccatataccctacttgtgccattaccgccctattgggcatcaccgtatccataactttaacagtgccactatccacagcttccatccctaaaatactcttgatcaaggtggtcttcccagctcccgatggcccaatcaagccataaatcattccagccggcagtgtcaaatcaatctgattgagcacttgctgatgaccaaagtgcttgctgacctgcttggcgatgacataatccgttgccattttaataaccctctttctcgaagtgagtgcatactcactcacttaatggctttagtataatcagtacatctcggtttgtcaacagcaaaaatgagttgtcactcacttactttatttccagcccatttgtcaccgcactgcaaacaaaaatgcgccaccccgttgttgggatgtcgcattttaattaaatatcagcactgatataagcgttagcaatgttttaacgattgttaatcttggtcagcaatttttgtcctagctcataatccaactgacgctccgattccggcatcatgtcgccgccagttgcccagacaatgtgggtgacgtctttgccagcaagcgtgggaaattgggccatgatgggggcgatcgcggtaaagccggctgcagcggatggttcgaccattacatcttcagtatcgacgagcttcgtcaaataacgatataaatcatcatcttcaaatgttgctgttccgagtaatagcgtttgcatcaccttgcctgccaaccgtgatggccggctaacggctaacccatcagcggcagtcaggccatctaaaccaatgtcttgaacagcaattttttcattcagcttggtcatcatccctaaggtcacggacggcacgtgggtcggttcacaaaagacggggtaaatattggctcccataatcatcttgaggccaaaagcgacgccactaggactgccaccgaccccggccggtaaataaacgacgaccgggtgcgcagcatccatcttgatgccttgtacttttaattgatgttgtaaccgtaccccagcaacagcgtacccgaggaataagtcacgtgaaccttcatcatcaacaaagtgcgtatggtcatccttggccgcggcggcacgggccaccggaatcacacttgaaaagtcggtatttagttcctcaacggtgacgccatttgcccgcagtttgtccttcttccactgacgagcatcgtgagacatataaacggtcgtcttaaatccaaacgttgcggccatgatgcccacactgagtgccaagtttcccgtcgatgcaacgatgacgccgtattgtgcaaataactcgtgatacttagccgttgccaagacactgtaatcatccatatacgttaaatccgtatgggccatggctacctgttcagcaaacttgagcacttcgtaaatcccaccacgtgacttgatcgaacccgaaatcggcaactgactatcagcttttaaataaagctgccccgccaatgactggtggttgagagcctcccatgctggtttcatctgctcaagtggtaacaatggtgactcaataatcccattcatagctgccgtttctggaaaagcaacggccaaaaatggtgcgaaacgttcccaacgtgcgaccgcgtcaaaaatatcggcccgcgttaacggcaggtccgcccgcttcccataatctgggttctgccaaacaattggtcgttttgccatcaattccttaatctgtgggtgttcttcaatcattaccgttgtatccatactttcaggtccttttcatttaattgcatcatattacgtatcgtgagttaaaattatcagttttcgatggccgtctgcatgcgttcagcctattccgaccttccgagactaggtaacatactgaaacgtcaccacgatcagcacaaatgccgataagtcgatataacacgcactgagccaacaagcctcccccaacccgaccctttcaaccgaacctaagttagtggcttttctctgaatctaacgatttttaatcacaactcatgttagataatatgacatcaccttcgtccatcatttaaccatatttgatacttagaaacaatctttaggcactgattaacaataattgttgattagccaatcaaacaagctaataaggcaatcgaaaaacgacgttcaaagttcactcactttgaacgtcgtcttcaattagtggttattaattgactaataatcgtcgttcgaactgcataatcattcagtagtcttctagcacaacgagtttcctacttcaaatcggccccattcgtccgaatcactttttgataccagtagaacgaatccttcttcgagcgctctagtgtcccgttaccttcatcgtccttgtcgacgtagataaaaccgtaacgtttcgacatctgaccagttccagctgagaccaaatcgatacacccccacggcgtatagccaatcaagtcgaccccatcttcggtaacggccttgatcatttcactgatatgagcgcgtaaatagtcaatccggtaaggatcatgaatactaccatcggcttcgactttgtcgcgggcacccaacccattctcaacaatcatcattggcttgtgatagcggtcttgtaaccaattcaaagaataccgcaaaccttctggatcgattggccagtcccattcgctcgtcttcaaatatggattatcaacggcttcggtcccgacaaagtggtaacttgggttatcatcctgagcggcgaccgtgttggaattatagtaactaaagccaatataatcaacggtgccttccttcaagacttggcggtcttcggccgtgatatcagggcggaaaccagtctgtttgaagtaagcttccatattatttggataatagccccatgactgtacgtctgcaaaccaataacgccgctgcatagccttttcagcttgcatgatatcttgtggcttagcagttgcaggataaatcggtgtcatgttgatcatattgccaatctggaagtcgggattaatggcatggccaatcttaacggctagcgcactggcaacgacttcataatgagcagcttgatacatcaacgcttcagcgtcaggatcatcgggcttcaacactaaaccagaatccgtcgccatcaggaattggttcgtataagtcgtctgattattaatttcattgaaggtcatccagtacttaaccttgttcttatagcgcttgaagaccgtttcagcatagtgcacaaaaaagtcaataactttccgcgaacgccagccaccatattccttaactaagtggtacggcatttcaaagtgggccagcgtgatcactggttcgataccatattgccggcaagtatcgaacatatcatcatagaacttcaaacccgcttcattgggttcttcttcatcaccatttggaaaaatccgcgtccaggcgatcgatgtccgaaaacacttgaagcccatctcagcaaatagcttgatatcttccttatagtgaccataaaagtcgatgccttcatggttcgggtaattcttacccgcaatcacaccatccgtgatttcacgaggaacaccgttggcaccggcagtcatgacatcagccacactgacccctttgccaccagcttgccagccgccttctagttgatgggctgcgaccgccccaccccataagaaatcagatcgtaaaccactcgttgttgccatgcattatcatcctttcactataaatctttaccatcactcgcaataacttgttggaaccagttaaaggagtctttcttagaacggtcaaaactgccttgaccattatcatcggcgtcaacataaatgaatccataccgtttcgccatttcaccagtacttgctgagaccaaatcaatacagccccacggtgtatagccaatcagatcaacaccatctaatacgaccgcttgttccatcgccaagatgtgatcacggaagtaactgatccggtagtcgtcatgtacactcccgtcggcttccttcttatcgtaagcaccaaagccattttcaacaatgaattgtggtaagtgccaccgatcttgcatccagttcatcgcatagcgcaacccagttggatcaatttgccagccccaatcagacttctcaacgtaggggttctcaacaaagtcatcgggttccttgaaatcgtaatcactgtcaccgtcacgaccctttgtaacaaatgacatgtaataactgaaaccaacgtaatccaccgtaccagcctttaaagttgccaagtcagcagcggtaatatccatatcgaagcccttgcgttcaaagtacttcggtaaccactttggatattcaccgagacagtggacatccccgaaccaataccgtttttgcatggcccgttctgccatcatcacatccgctggtttagctgttaacggatagattggacacatcgcgaccatacagccgatttgaaaatcaggattgattgcgtggcccgcttgcacagctagggcactcgctactaattcataatgagctgcttgatacatcgcctgttcccaattgtcatccttgctaagttgtaggccggaattttgtaacaatgggtgcggatcactccaagctgtttggttattgatttcgttgaaggtcatccaatacttgaccttatcctgatagcgcttgaagacagtcttcgcaaaatgaacaaagaagtcgatcatcttacggttgctgaaaccaccataaaccttcactaagtggtatggaatttcaaagtgtgacagggtcacaacgggttggatgccatgcgataataaatcatcgaataagtcatcgtaaaacttcaaaccagcttcgttaggctcgctctcgtcaccattcgggaaaatccgggtccacgcgattgacgtccggaaacacttaaagcccatttcttcaaataatcgatcatcttctggatagcgatgataaaaatcattgccccagtgattaggatagatttcaccatctttgacgccatcagtgactttacggggaaccccgttacgtccggctgtcattacatcggcaatgctaacgcccttgccatcaacatcccaagcgccttctaattgatgggccgcgaccgcgccaccccacagaaaatctttgggcattttgtatccttttgtcatgaactaattccctccattaatgctgctcaggctatccctgagttacagtctttgttaccttaactaacgaaaagcgtgtaaccgccacgtcaccgttgttaagctgtctgccattataagcgaccacggcatgaatgaaaaaacaagcccagaccaacaccagcaggtatttgcctaggctcaaattaattaactacttcgcctcatcggcaactaaacgccgataaacgtctacaacttcaccagctaagtcgcggaaggtgatggcattcatgatgtgatcttgtgaatgtactaataacaatgacacgtgggtatgttccccttgtgcttccgccgttaacattgaggtttgtgaattgtgtgcttcggttagaaagttatctgcttcctttaacttggcatcagcggtttcaaagtcgccttccttagcagctttaattgcttcgaaagcggaactctttgcattaccaccattaacgatcaaacccataatggtttcgagacttgcttcaacttcttttgtttgttcttctgccatttaccctcatccttttagcatttattcgtgtgcatcacaatcaaaatgccaccggccgcgattgatctaccgtgggctggtagcacttacaatttaatgattagtttgcttttgcaattgatgcttcggcttcctttaaaactttttcgccgttcatcatgccgtagtcttgcatgttgataacttcaactggaatatcaacgcgcttttggaaatcacttaacatataacgaacttgtggtccaagcattaaaatgtcaggattcttttcagctaacttcgcatcagcatcactggcagcggttgcaaaaatatctgcatcaatgccttctgcttccgcagccttttgcatctttgagactaataatgacgttgacatcccagcggcacataccaacataattgttctttcagccataataaacacgctcctagattgttttaaatttatatgttacagcggttgctttaataaaccgctttcattacaattagaattataagtcatgggtacaaatttgacaagccttattaatcagatatctgcaatttatttgatttgtacccacaaattattaaataacaacttaatattcgaaagaagtgaacaccatgtatcgtgacattgcaaccaaactcgttgccgccattcaagacggcatttttaccgtcaaactccccacggaagcccaattaatggaacgttaccaagctagccgcaacaccattcgcaaagcgattgacttggtgtaccagcaggggctcctgcgtcgggttcaaggcagtggctattatattactaatattcagcttcaacataaaacggtagtgaatctgtcagcacgctcactcttcaatagtcatgtccacccacggactttaacttcgaagattctgacttttgatacgatccacggcgatagtgccctgagccgcaaactcaacattcccgtcgacgaagaactgtatcgtatcattcgcctccgctactggcacgaccaactgtattgtttggaaaaggcctactacttacgctctgtcgtcccctatctatcgaccgaagctgtcaatacgtcaatttgggacttcatcaacgaagcttacggcatcgggattgctaacagtgatgattatctttcactcaccaatcttaacaaggaagaggccgaactaatgaatttggcacagggcgcaactcacttggccttggattcttgtaactattataagaataatggcttactagatttttctcacaccatctttgtttatcccgacctcgcattgtattttcatacgacaaatcttgcaaataattaatttatggctaaaaaaagacgattcactataatttcatcacaatttatgggtatactagtaacagtatccaaatttacgatggaggaattagcgtgtcagcaccccttttttcagtggttgtaccagcttacaaccagcacaaatttatagatagctgcttgactagtctacaacgccaaaccttgacagactttgaagtcttcgtggttgatgattgttcgactgatgacactggtgaacagattgccgcgttaatcaaaggcgacgaccggttccacgtgatcactcacgcccataaccggggcgtctccgcagctcgtaactccggtatggctgctgctaagggtaagtacctttgctttgtcgatggcgacgattgggtcgaaccagactttctggcaaccttcctagccgcctaccggtcagcacccgatacccagctcgttgtatgcggtcactacggttacttagccgttccgagtcctgccaaaacatacaaccaaaaagacttgattgccaacatcaactttggcacggttggcggtttttcgtggaataaagcattcattcgcagtattattaccacgcaccacctcaagttcaacgaagatattgattttcttgaagaccagttgtttgcctttcgttacgctaactacgtacagtcctccgaatacgtaccggaccggacttaccattaccgttggcgttttcgaagcaaccttgctcacattggaattccattcttcaccgctcgtcgtaagatgatgaagattctcaagcaggaaaacaagcaagttttgaacgaagattggaataatcagtagcaacgttacgttgccatcgcccctaaaggtcggtagctgaaatagctatcaccctttaggggattttttgatacctagcataatcggctacgatgaccagaagatgcgcaattattcgaggctagtagccatccactcgcagtctcaaatgcgctttcgccgccgattaaaccgaccgtggcgcgaaacaagctagctgctcaagctctttttgatatcagcgacaaaataaagtggcaattaacaattaaagacttgttgaatgacgagtaacgctttacaattggactatattaattaatttgatgggagggttagcgatggctacgattcacttatacttagtccgtcatggacaaaccaagctcaacgcggccggccgtttacaaggcatctatgattcggaactcacacataccggtgtgcgctccgctcaacggttagcccgcatgctagcagatgttcatttcgacgctgcttacgtcagtgacttgggccgagcacaacaaacgagtcgcattatcaccgcactccatcctgaaataaaaaagccgacgattgacgtcggcttacgcgaatttaacttcggtgggcttgaaggtaccagaaacatgtggatcgtcaagcaagtccaaaaacaattgggcattggaacgtttgttaagttgatgttgagtcgtgaacgcttcgccaccctactatgggtctttaactccctcgaccagactcgtggcgccgagactttggtcggtgtcacggatcgaatcagtagcgcgctacgacgaatctgtttgtatgaatctcaggatagtcagcatgacaagaatattcttatcgtttctcacgggctggttctcagtgcattcctataccaaatcagcccccgtgagcttcccacccgactcctgaaaaatacaagtgttagtcgcgtggactaccaaaatcggcaattcaagttgatcgacattaatatcacccctaagaagcgggcctagttgtctcgatgctaacaggttgcgtggtacaactcggaaattgcaagcgcgcctgaataccaaaaaaggctttgattttgcgttgtaattcttgaccagttgcatgcactgaagcttcacttgcatctggatcgccaactacaattaaaatgcgactgcttttactatccaaattaggcctgattggggtggtagcatccgctgaaagactggccccttgtgccgttaaatgaagctgaacctgctcagtgccaagcgtattcatatcccacgcattgatctgcactggatggcgcgcgtgaatcacttgaagcaagtctgccaaagcattctgcggctgagcaacggcaagcccttgtgcagctaattgtttttcaattgctggattcaactcacggttatcaagattgctcatcgacaaaattgctagtggaatttccgtggtagtcgtcggtaagatttcaattttcaacagttatcacttcctaaaaacacttcaatactaagtgtgccaaatttgacgtaaaagtcaattaccaccacttaagtcatagcgaaattttaataataccacaaaagcgattcccacacacgtgagaatcgcttttttaatggccttattgtcctcgtcgatacaccgatacgcttgtaagctgaccttacttagtcgttgataatgggtgggccgcgaagtatttttctaagaatagtgccaaaccatcattataattcatatcagttacatagttcgcaactttcttaacttgtggcaaggcgttgcccattgccaccgataagtcagcttctgccatcatcccaacgtcattcaaaccatccccaaagacaaacgtgtgggcggcatcgacatgttgctcacgttgaatttgtttgaccgccgtccccttatccgtattcagaggaatcatctcaatattattcgggttcgatgatgaaagtcgcaacaatttactattagtgagcttttcgcgggcagaatccagccgtgacatgtcttcacgactgagaatgacgccgttcgtaatctggtcctcaatcgtggctaattgcgtaaagctcttcacttcttcatagccaatcgagacttcatccgcatcaaagttagccgcattacgagcaacgaaccgtgggatttgttccgtatagtaggccatgtctggcgtgaacaacatcattggtaagttatcacgacgtgcaatcagataggcaagctcaaccgcagcacccccgagtttggttagctcacggccctgggcaccatcgaacaccgccccgttagacgtcaccaaacgaacgtcagcgtttactttgtctcgaacgatcttcgccagctcgtacatgcgccccgtagcgatgtaaaataacacgtcctgcttctgaaaccgttcaatcgtcgctcgagttcgctccgagacatattggtgatccgttaataatgttccgtcaatgtccataaagactaaatattttggcatagttgaactcctcctacgtatttacctatatgttgtgctagctaactgatcatctgtgacattcagcttgactgcttttgctgggtttgccaatcagtcggtaccatcctgccatcgtcagtaaatacgcaaattggcgtatccgcactgatgagtaagccggttggccggacttgaatgggcttaaattaaaaagatgacgcaccgccgccttttttagcaatcataattagcacaaggcttatttacactcccaattgtacgctattccctcctataatggaaatcgctttcaaaaccgaactagccaccgcattttcaccacgtaaggctaaacaatcttaagtttagaagctatttagagcattatttgccctcatcggctttatataccaaagaattcaatctcactacttgacattcaccagtctagccgataaattagagaacaattaataaatgatgataaaaagcattgaacagttcagtagttgccggtcgttagccttagcgagtctgagatggtgtgagcagacctaatccggtatcacgaatatcgactgtgagttgtatgggtgaaatcaagtaacccgtactggttaacacccactaacgtgtggtacatctttcatgatgtgcttaaggtcagtaatgtaaattgctgatgaataccggtggtaacccgcgctcgcgtccggcagacgacttcgtctgtcggacgtttttattttcatttattaataaatcattttaaaggatggtcatacatatgcattttacagtactcggcgcaggcgccatgggattacgttacggtgtgttattacaagaagcaggcaatcaagttgattttgtggatacttggcaagcaaatgttgatcaaattcatcgtcaaggtggcgtctacgtgtcgcgcgatcaccagaatcgacacttagttcccgtcaaagtctcaactcccgaagattatcacgatgatcccgacgtgtgggtcgtatttactaaacagatgcaacttgctgattttttgactcggacggcccacgcttttaatggtcgccagtacgtgctcacttgcatgaatgggatgggtcacgttgaaaaattattacactacttcaaacccgaaaaattattagctgggaccgcactagtcgctacggtcttaaacggccctggtgatgtcgacttcattggagctcgcggcgccggcaccatgaatctcgccaattatacggaacaccctgacgaaatgacccaccgaatcgtgacagaattagataaatgccaattccaccctaatttaacaacgaacttccgcggcaccttgctggctaaagtcgtcttcaactcagtggtcaacaccctctgtaccctctttgaaattacgatgggcgaattcgcggcctatccaggggctgatgagctgagtcgtcaattgatcgatgaagcctatgatgtctgtgagcgtgatggtgtcaccatgttgaatacccgcgcggaagagctcgcctctgtcaactacgtcagcaaagtggctaatcccctccactacccatcgatgtatcaagatatgtctcataatcggccaactgaagtcgactatatcaatggctacctcgtcaagctcggccaaaagtaccattaccaagcaaaaacgcacgcgtttctgacccatctggttcacttagccgaaaccacccgccaaaccagtgccacaactgaacacactactgaacaaaatgctcagaacgcgaccgaacaggctagtcaacaagcaagtgcgtaaccgattccccttttctcagcaaaatcatgtacaatggaggttaagttgattttactgaggaggcggtttgctgtgcaagtcagtcgggaattcaaaggtatctttcttgctagtatcagtgcgaccttctgggggatttccggagccgtcgcacaaacactttttgatacgaccgatattaattctatttggttaacgggaattcgcatgctgggtgccggaatcgcactattactggtcagtttgctgacccatgttgatttgtggtcgatttggcgtcaaccccgcgatctcctacagatcgtggcctacacactattgggtctaatgccggttcagttcacctactttttagcagttgaagctagtaacgcggcgaccggaacaattctacaattcatgggacccgtgttcattgctctgtggatgctagtcgctcatcggcaattgccgacccgtgcagaaggccttgcaattatttgtgcactactgggctcattcttgctcgtgactcacggcaaccctcagaccctagtcatctccgtctgggcgttgatctggggactcttatcgggggtctcgtccgctacgaataccttgctaccaaccaaactacttactaagtacgacccaatgaccgtcaacacctggtcaatgttgttagggggtatcttgtttaacatcgttcagccagtctggtcaatccatattccactgactatgcttaatatcagcaagttgacctttgttgtgctgtttggaacattgttagctttcctattcttcttgcaaagtttgcaatatatccggccaaccgttgtcagtctactagacgcttttgaacctttatccgcaaccatcattgcggtggttctactcggtgtcagcttcggttggctcgacattctgggcagtgtcctgattattagtaccgtctttattttggctattgggcagggtcccaatgatcgcacggcagagaatttcaagcaaccataaacgatgactcataattatgaaaccagtaaaagccggttgtgactaagtcctagtcacaaccggcttttacattgccgctaccgttacatatattcaattaataaccacgattcagatccacttggttacgtaccagcgtgccatctttgacaaactgtgcaaagttcgccgcaaagattggaaaaacggtcgcccgaaagtgggcaatttgacctgaaatatgtggcgtaatcagcacgtcatctcgttgccacaacgggtggtccgtcggtaatggctctggttcagtaacgtccaacgctgccatactgagttgatgatgatccagggcggtcattaacgctgtagtatcaaccgccggaccacgcccaatattaatcaacatcggttgctgtttggtctgctgaaataattcagtactaaacaaatgatgcgttgttggcgttaatggcaaagcgttgacaataaagttagccgttgctaacgcgtcagccgtcgcggtaaatgccactgtttcatgaaaatgatcagcggggtgaccggtcgtattgaccccaatcacgtgcatgcctaacgcactagccttagccgctaacgattgcccaatttggcccgtgccatatatcaacaactgttgcccggtcaaggtagatgtcgtcattggcaaggcccattgccgtgccccgcgctgattcagccaggccgcatggtacccccggactacgcttaacatcgcggctaagaccgattcactaatcgcatcggcgtgaataccactcgtgttcgcaaccaccaccccggccgcttgcaatgcctttaatggcaaataatcgacgccagctgaaatgacctgtacaaactttaactgattggttggccgcgctaggatcgtctttaataacggatgattaccatacatgacttcaatttggtcgtaatcggccgccgtgaccgccgccgcatccttgaacgtccagtccggataagtggtttgtaactgttgcagctgttcaggtttggttgcttgagccatcaataccattggcataacttattaccccatttctaatttcttgatcaatacttttatcataccactatcattcacttgaaccgtaatgatccacaaccggatattagctaagattggccagtaagttaggctgacccttttttagcccacagtttggtttaaatcacaatgtttgacgctactgctgacaaacggctcgcaaaataccaacaaaaaagcgatgttcgaaagtcgcactcccgagcatcgccaatcggtaactaacctaattgggtttaatcgttgaccaattatttaacaaccgcaaagccaccggtccagccgatttgttcactggctgctaatgtcatttgcataaaccccatcgcttcaagctcacgggcccgctttaacttacctgcatccttcacttctaacggactgtcagccaaggcgcgggtgaagcgttgcttggcgctatcgtcattaccagcaactaacacggttgttggttccttaccattgacctgcccactctgaagcgtcgccgcaaaagtcgtattgaaagccttgagcacctgactatctggtagttgctgctgtaattcttgggcagccgaactatcagctggaacaaccaagtcatcccacgtgtcaaaattcaaggggttcgtgatatcaacgacgattttgcccttcaactgagtcgcgtactgtttagccagcgcagctaaagcgggataaggtaccgccatgatcacgatttcaccgagcgttgtggcttggtccttggaaccataataagtgacctcgtgcccagcgatttcaaaattatgaccaattgcttgccccatgttgcccttaccaaaaattgtgatttccatatcaaaacacgcctctctcactttataattaattttatatttacattctaacattgatgtcccgtttacatcacttttgtgtctgccagttaccgcaaaccggtcgtcattcgccccagataatggacactccttgaatggtaacaattagtggaactaatggctaaccagctcggatattcacctgcctgcacgcttcccaggttattgacacgagtcgatcagtcactaacgaccaaaaaccgaccaacttaattatgaattaattaagctggccggtttttaaattttcagacgatcatcaagtttactggtcttgtttacccagaaaaattaattattgcccgttgccgtactataaccatctgtagaagaagcagtgccaccggtcgttgttgaagacgtatctccataattcgtcgttgagctactatcggtgtttgcactataactgtagctaggcgtacttgagctcgacgttgccgagctcgtgtccgtatcgttgctataactatgcgttgaagccgaactactgttgtcactactttcactataagtcgaatatgatgaactcgacgatgattctggttcactatagctatacgtgctcgaacttgaggctgaagacgatgcgttattcgctttcgccaacttcttgcgatccgtaatcaacttctggtaatcattggccgctaactgcgactttttgcgataagctttcaggtttgcaagtactttatcgactgtcgttgacggggtcgaagccttgagcttatttttcttgttatataatttttggaaatcagcatcatagctgaccactttcttaaccgtttttcccgttgtcgtaaacaacttatcatacttcttagcaaagtacggcttactagtcgttaagccagcagttgtcaaccgttgctgacccttagtaatggtgtccatggtcacgtcggtcttaagtaaccccttagcgttgcgtaaatcttggtaactagtccggaccgtcaacatcttagcagccgtatcatgctgtttctgcaaacgggtcttttcacttgaatccttcatattatcaatattattttgcaacttggtcaaagtcgagcttgaggcactcgcccgcaagtcccgttgggctgatgatgtataaacttggtccacgatcttttccgcattggttcgtgccgcagcttgagtggcttgcccatggttccacatgaagaaagctccaccagcagcaacaaccagaatcgcaacaccagccaacatcaacttccagttatagcgccgagctggcttcttaagatgtggattcttttcatccgtttctaactcaaaaaagtcacggtcgtcatccggctgatcatcatgtggtacccgctgttcttcgtgccgagcgacccgtgacatggttggcttattgggctgcttgccaccgttgggctgctgatcaccatacaactcttcacgtgataatggtaactcaggctgcgtgtcatcatccgcttgttccgtccccttgaccgcaatccgcggttgctgtttacgagcaaccggtggaatatgatcagctgggatgcgcctttcgaccttcggctgtttagcagcagtcgcttgcggatccttagcggttgtggccgtggcctgagataccgcagcctttgatgtcgctgacttgggggccgtggattgtgctaccgcagatgcggcggccgcggcactcgatgtcgaagcactagactgttgactgtgcgtcttggcctgactggcagcttcctgactagcacgccgggccatccgcgtcattggaacttccgacgttgccgccgactgatgaaccttggtacttgctgttgttttagccacacgcttctgatcagacactgcggtgctggttgcttgtgacgcttccttagcggcccgcgctggtgccgattgagccgcactagctgtcgtcgaagctgcgtgcttggaacgctggtcacttactgcctgtgatgagaccgcgctggccgtctttggcgccgcctgacttgctgttgaggccggtttagttgcggcggactttttagttatttgcgcggattccgcctttgacgacgactgagaaccagccgagcctttttgcttaaccgcactagtcgccccatgcttgacgggtgccgccgattgttttacagcctggcgatcgtctccggaatggcgcgcttttttagccaccttttctggttcaattactgcgtcaacaggttgcttttcggcactgttattcgccgtcgagcggggaatattgaccgttgattttgcttcggcttcgtccgcctttgatgcggccgagtctttcagatcataggccaaagggatctgttcattatcttgttcagtactatcatcgtcgggaattggctcagtaatcgaattccagagccgtctacccaatccttcttttttattttttctagacaaaaccaacgctcctcgccaatttataatttacattagattcctggttaagcgccgaccaaaaatttttatcaatttcggtaaaataaccattaatagttaaattatagcatggaattggctactgagaaaccactggtcaagcggatttgtgaataactgcccaataccttaaattaaggttaaaactctgctataatcggcttatcaagatatttgaaagcgaggagttcatatggctactgcgaaagttatttttgctaccattaccggtaacaacgaagacgttgccgatattattactgaaaaatttgaaaagcttggggtcgatgttgccaaagaagaaatctcgcaagccgacgcaactgaattcaacgatgttgatatttgtgttgttgtcccttacacctacgatgagggcgccctccctgaagagggactcgacttctacgaggacttacaggatttggatttaaccggtaagatttacggctgtgccggctctggcgatactttctatgatgatgattattgccgcgccgtcaccgatttcagtaacgcgttgaagaaggctggggctactcagggtgccaaggacgtgttcgttaaccttgcgccagaagctgatgatgtaaaagccctggatgcatttactgaacaactcgttgctaaagttcagtaacctgactagtttgattgagtgaataacaaagaaacgcttcaagaattcatgactaattcttgaagcgtttcttttattaactgctatcgacacatcatcctgacgctgataccgaaaatcacaatcaccgtaatcacttttattcagtccttacgatttcgagcacgttgtttaatggcgtttcacacgccgaaatccgagccaactaccgaacatggtcaaccccaatagcactgttcccatcacatttgcacgacttggcgcttcaccagtttgcggtaaagccgatgtgccgagtttggccgttacaggctgaacagctaccgaagctgattcagtcggccgtgattcttgatgatgaccgccaacgatagtttgcgcgtgttgcagactagctgtgttggtcatctggctccgatgcggccatgaagtgactactgatttagccccattagccgtcgtttgcatgccagaattacgatccgcaccctttccatgattcgtgccaaccgcgggtgttgcgtcatcaataactgcatttgcatcaacgtcagccgcatcaccctccatctggtcagcatcatccgtaggtatttctgcttgatcatcaccatcgatacttccagtcgagccgccgttcacatcgtcattggtattggtagcgcctggctgttcagtattcgtatcgccatcgctcgccgcaacgaccgtgactgttgccacgcgagtgaaaacttgaccactcgcatccgtatactgataagtcacctggtaaacaccggcttgattagtatcgaccgtgccagttacgactaggtcagcaagcgacaattcaccgccattaacatccgtagccaagactaaattatcgcttggttgccacgactcaccgacagtaatagttgaatcatgaatctgtaaatcgctttgggattccgcctgttcgtcggcctcctcgataaccaccgttaccgtcatcgttgccgtcaccaactgaccagtcttgtcagtaaattgatacgtcaaccgatagtccccggctgtagtccaatctggcgttccaacgacctcaatggccgaccagtctaacgtttgaccatcactatcagtggcattctgaaaattgctttggggctgccaagtactggttccctgcccatccgtatgcaccgttgcgtggttttgatataagttcaaactggcttggttttccttaacagttacagtaatcgtctgcgtctgactaccatacgtgtaagtaatctggtaatcacccggaaccatggtgttcacttcacctgttatcgtcacatcgttaaagtcgatggcgtgaccgtctttatccgtcgccccgtcaaaaccgtcctgcgcatgccaagtgccaccagcgtgtaactctgtatcatggacagtcaaacttgtctggtcagctttcacgatcaccaaagcagtgaccgtcttacctgcatacttgaaagtgacctggtaagtacccggctgacttgtatttactcggtcacccgatagtttcacagcctggggattagccacatagagggcctgaacatcgactttttgaccaaattggtcggttaaactctcgatactgtccgtccagttccaatcatcgccaacttccagggtaatgtcgttggcatcgataactgcttggtttgcttcccagatgtaggttccaatcggcgtattttttcctgaatacagattcatcagttcagcactagttaaccgttgctggggattggctacatttatccagtaaccggtatattggtcattagcttcaatgtccattagcccaaccgactcgattttggctggcgtcaaatcagtatccggaccaagtgtaattttttgtagacgctcacatcccgcaaacatgtcgagattttgttcaacgcgatgcaaattaaaaccagatagatccacctcagttaaattggaacatcctgaaaatagcaaatgaatccaagtaacctgatctgttttgaactgagacccgaatttaacactggttaagttgtgcatgtccataaaccaagcagccatattgtcaaggctatcagtcttccatttggataagtctagctccgacaaccccgttttgataaacaaaccgcctgcttcttttaggctttcaaagttcaaattctcgataccaataatacgagttaacttttcattgggaccaaacatgtagtccgcttcacttactcgacgagtgtcccaccctgaaatattgattgtcgttagttggctagtccctggagaattgaaaaacaggtaagacatatcagtcacatttcccacctgccagctgctcaaatctagctccttaacatgcgtattttctgaaaagaaatatcttaaatccgtcgcagaactaacatcaattttttcaagcccttcatagtgttcaacattcgtcaaattttcaaagaagcccccactatcacctataatgcgaattggctttgaaatcacaactttaactatttgtaacacccacgattttgattgccacggactatccccatagcaatcgtaaatatcgccaccgtccaacactaacacaccagaatccgcgtcaaaatgccatttaatgccatcggcgttgtaaccagcaccccagatgccggccatcgagtcatcgtcttccatatcatcgttgcgataaccatccgtgagatgtgggcgttctggatttcgaatcacgccagccaaatcaccgcttccccgctcattgatggtttccgttttatgctgcgacgacaagacttttgcagtactatccgtgtcaatatcttgcgactgctcgtcggcactaactggctgttcagaatcatcagttgtcgattggttcggatgcgtatcaagtgttgcagtatgttcgtctgacggaacgggggtctcactgtcaacttgatccgtgaccggtacactgacctgatcagaattcgcatgctcatcatcagattgattgacaatctcatcagtatactgttcttcagcggcctgcactttaattggttgagcttcagttaccagttcactcattgcggattcatccatggcgtccgttactggggattgctgctcagcgttaccttcagacaaagttgccactgccggttcagtcaatgcttctacgtgtgttgattcatctgctcgtcccgtcaccacattcatgttcaacgtaacgagcgtgattccagcgaacaaccacaccttaccactcttgtacatcttgtaccgtttcttcacttgttccattaatttctcactcctttattaattaaccttgccgacgtttaatgccgacgatgctggctaaaccagtcaccattaacatcatgagtcccagcaacccgaagcgattaacttgttcgctagtttgcggtagctcaccagctactgacgctggatggctgactggggccatagtcacttccggtttagctgtatcagccttagcataacgtttagcatcaattccgtcctcattgcgttcagccgtattcagtttcaagttatcacgaaacaccgtggtcacttgcttctctaaaccaccgttaaattctggtcgcactatcgtgtctgcttgctccctttgactgctggaaccagcgtttgcgcccgttaaaccactgttaggatcactagtatcagggtgttcagtagttcccggttgttctgattgttcaggaacttccggcagttctggttgatcaggtgtccctggcgctgacggttcccctggtgtttcgggggtttcaggggtttcaggctgttcgggtgttcctggttcttccggtaactccggttcagctggttctcccggtaacggcgtttcaccattgccagcaccttcgactaccgtaatggtggctgtttgagtccactgcaggccattggcgttcgtgtattgatacgtgatttcataagtaccgggttgcgtcgtgtcaacgtcaccaatcacaactaagtccgctagtgttaatggccgtcccgtcgcatcactggcacttacgaagttgtctgccgcctgccagtggtcgccaactgtcaccgttgtatcttgaacaaccagttctgtcaggtcttcaacgtcagcctcttgttcagtcaccgtgacggtcgttgtcgccgtgactaactgtccggtcaagtcagtgaactgataaacgacctcatatgtccccggccgtgttaagtctggttctccaagcaccgtcacgttctgccattccactgaacggccatctgcatccgttgcactcgcaaaattatcccgtgggcgccagacagcgcttcccgttgcgggatcaatttcaaccgcaacttcttgcgcatgcaaatttagttgactttgattagccacaaccgtgacaaccacgtttgtttgccgacccgcataagttagtatcacgtgatacgaccctggccggctggtgtcaacaggctcaccgctaactgtcaccgcttgggggtctgtactgaacaagactcctggatcaactaactggccattttgatcaactagttgcgcaatattttgtgtccagtcccatttttgattcaagaagagcgtgctgtctttaccggtaatcgcggccgcagagacggtttcccagacaaacgtcgccgtgtcagcgtggtttcccgaatattgcgccaggagttcagcactcgtaaacgtttgcgagctatcagctacgttgacccatttgccggtatatttgctattcttaggcacttccggtaaatcaactaagggttgcgtgccgtgttgactaaaatcaagtcccggaccaagtgtcaacgtttgcaaacttgtcaaaccagctagcatttgccagttttgttcaacactctgcatattgaaatgggacaagtcgagcacctttagtttggcatcatcattaaacaaactattgatttgagtgactttagcgacggtaaactgcgtaccgaattcgatacgctccaaatcggacatctgcgcaaaggcaccatcgatttcaaccaggctggctgaatcaaagctcgtcagattcaagtgacggacgcctgtgcgcgcaaacatgttagccatcgtcgtcacactgcgcgtatcccagtcagtcaaaccgtcaatagttcgaagttggccgttgaactggaacatattttgcatgttggcgacattatgagtatcccagccactgagattaaggtatttaagttcagtacccatgaagttccccataaacatgttcaccattgtggtcacattgccgacttgccaagcactcaagtccagtcgctctagcgaggtattttctttgaacagagactgcatgttggtcacagcactggtatcaatcttttctaacccttcgtaacgcgtcacgctgtcaagattcgcaaacagactattcatgttagtaccggcaacaattttgtcagcaatcacgatacacttgatcatcggcgcccaagacttgcgacgccaaggattatccccataactgttatttaacgttcccccgttcagcgttagcgtgcctgtactggcatcaaagtgccaatcaacgccaaagttaccagacatttcatcctcatccgccctagtcacagcacgagtatcaacgtgctgtgactccaccttaaggtcatctaccagctgatgctgctcaacatgttgcaagtcagcggcgggtttacgttctgacgcgtcagcagtatcgagtaataactgttcactcgcttcaggctgttgttcactaacagtcgattctgcggcattactgaacagatcgtcagtccgtgatgcttcataactgttcgtcgcgggcgctaccgtgtttagtccgttcactgctgccatcgaatcagcggctacctcactattgggcgcgccagatgtcccgttcaacgcagccgttgatgcagcggattgcggctcgtcattagtagctggctgtgcatcgattaccgtctgattagtaatcgaagcgttctcatcattagccacgacaacgttatccgttttagaaaccgaacttgccagtgtttgattgctgctaccttgattttgaattgacacaccgttagtcgctacgacactcgtttcgctagtcgatgcagatgttggttcatccgcatgtgcggttaacagttgagtattcaacaataatagtgaagcgctcgcaagcaaccacatcttgccacttttatacattttataacatttcacttctgattcacggtaattgatagtaattccccatttcttcaaaaacaacctaactgacctaacgattaatctcattaaataaagtgttcttactatatttgattatcgtgtttaactagtacatcatttacggtttttaaatataccatggtaccctcataatgctcaactgattatcacaattctaattaacctgttatcattatgattaatccgcttgtttatcgcaaaaatataattatcaactccctatttctgcaatcgttttcatcgtggtgattcattaattctggtcgttttagtattcgaccaccactattcgttcaccatactgacagttgcatcatgcaccggtcagctgtcaccatggcgactgaccagtgtcttccagtaatccccggccatcaaaaaagccttgagcaatattactgctcaagacctggtttacccattctaatagcgtatttccctaatttgaatcgaaagactccccccgcgtaatcatgagctagtagatacgataattgtcactcggccccgagtcatttggatcgtcgtttcacaacgatttgtcgaatcgcattataaactagctcaacgatgacaaacagcaccgtgatacccacaatatcaattaaatacgaactaagtcgatagcccaccttgccgatccacaaatcatacggcccttgaatcagtaagaaatagatgactaacgtttcaaaaatcgtccgggtatgccgccaaaacgatcgccattgcattgatttcacgccccttcaagtggtgccaacatttgtaacgcctgtttgacctgactcactgctaattgactttgatcaccgacccggccgacgtgtccaaaggcaactgccgaccccgtcaactgactacagacactgttataacgaccaaacttgcccgtcgccgttgccacgattggcacaactaattgctgccgtgcttgctcagttgccgccattaatgccaacaccgtctgtgcatcatgtccagccactgtcacccgcacgacatcagcaccagttgctgctaattcgtgataagtcgccaataaatcgtcagttgttgctgtcgtgacggtctggctcgcaattaaccgaatttcgttggcacgcatctgtttggtcaacgtcataaaatctggctgattgaccatggctaagtcaatatccacgccagccacgcttcgattattcactaatgtttgataagtttgataatattcggtcacttcagctggatcgtttgccagcccaaacatggcaattaatggaatcgtccccaaaacttgttgcaattgggccgctgtattgactaactccgcacggttatccaattcctgataaggatctaaccgccaaacaacaatttgtgccaccgaagttaaaatctgccccgctttacgcaagaggtcctcccgtgtggcccccgctaaaacaacaccaatcttaggcatccctgtcgctaacgttaactccccaactgtaacttctttcaagaccattcctgctttcattttcattcgaacaatgcgcgtccgttgccgttaaattttatctactcttaacaatagcaaattttcgctgttttgacactcaaaattcattttttgacttaaaatttaaagcgcttttaatattaacttgttaatactggcatcgctttcagtttggccttacaattaagcatactttagctcacaaaggagttcaacatggaaaacgaaaaacaacttcgatggtccaacattgctttaattgcattcgtggcggtctggggcctaggtaacgttgtcaataattttgcgttacaagggctttcagtcgtcacttcttggattttgatcatgattatttattttattccctacaccttgattgtgggtcaactgggttcgacctttaaggatgctgaggggggcgtctcatcttggattcgagcaacgagtaccaagcgcctagcttactatgctgcctggacttattggatcgtgcacattccgtacttagcacaaaaaccccaagggattctaattgcattcagctggctgttccgcggtaatgggaacttcgtcaacacgacacctgcgttagtcgttcaagccatttgtttagtgctattcttattcttcctctggattgcttcattgggactaacgacactgaaacgcatcgggagcgttgctggtacggggatgttcatcatgtcgattttattcatcatcttggccgtatcagcaccgtttatgaccaaggcgactgttcaaacaccgaacatgttttcactcaagtcctacttacctaagtttgactttacctactttacgaccgtttcaatgttagtcttcgcggtcgggggatctgaaaagatttcgccgtacgttaataaaaccaaaaatccgggacgtgagtttccgttaggcatgttagtgctcgcaggtatggtcgcaatctgtgccctgctgggttcatttgccatggggattctgtttaactccaagcacattcccgctgatttgatggccaacggtgcttactacgcgtttcaacgactaggtgccttctaccacgtgggcaatctgttcttgatcctctacgcaattgccaatgtgcttgcccaaatctccgccttagcgttctcaatcgatgcgccattgaagattttgcttggtgatgccgaccctgaatttattcccaaaaaattaagtaaaatgaacaagaaggatgtgcccgtcaacggttacatcttaactggggttttggtcagcattctcattatcattcctgcattagggattggaaacatgaatgaactatttaattggttattgaacttaaattcggtcgtaatgccgatgcgctacctgtgggtctttctagcttacatgctactcaacaagcacttaaaggaattcaagagtgattacaagttcctgaaaaacccagtcgctggccgtttggtcggtgcttggtgcttcctgtttacagcatttgcttgcatcctcggaatggttccaaagacttcctacgctagcaatcctagcagttggctcttccaactgactttaaatattctaacgccaattatctttgttgccttagggatgattttgccgatgattgctcgtcgtcatcgcactaaaaccgcttagtgcgtcaccgatctttacgcccgcatcgtcgctctacgcctgcggactcactgacttttttgtaacgttgatcgataatctattcgccaccgctgacagcgaaaaaaactgtcagcggtggttttggtattaccaaccgttgctagtaggcatgcgtgttcacgtaacatttcagtcactaatttgcggctcacaatcttacactttttacacgtttagcggtatgattcttagtgaatatagtcaatccaaatttaccaagcagtcgctcttcaaggaggttcttattatggctaccgtcgacgctctcgacatgtttttgaccgattatgccaatatctctcgttacctgaatactcgcttaaattcactactggccacgcaacatcttacctttgacgcttttttaatcatgcatgaaataggtcaaagcccccagccactattattaatggagatcgcacatcagcaccatgtctcacgcagcgcaatctcacgccaaatcggagtcctcctcaaacatcgatacattgagcaacaggctaatgccactgatcgccgccaaaaaggactttccttaacggctaccggccgtcacctagatcagcaactaatggccaccatgcacaaaacggttcaccagtggacgactcaattgggcccgcaacgggtgaagaccctgctaggcatcttcactgactttaacgagcaaattatcaataatgaggttcccgccagcgattaataaccagccatcctcagcttcatcattcggcattagtcgtaacgtgccccattttagtaagctgatttttattcgtcgccatttcaagttacggcttttaaaggccttaatcaaaaaacggcgccatggatgctagtgattctagcgtccatggcgtcgttaattttcagttacaatcaaagcagcttacactacggtacgttcgtccgcgacttggccggctctgccgctagtcatctgcatgcacgtcaaaggcatgcaacaactgttctgaaacccctggcgcatctgggtcgtggtgacctttaccggtatctaaagctcgtaattgggccatctcagtcgaagttaattcaaagtcgaagatatcccgattactcttgatccgtgcactgtgcactgatttaggaaagacgatcacgccttcttgatgttcaaatctaagaatgatttgaccagcatccttatgatacttaatagccaattgttgaatgattggttctttgaataatgcttgattgccctgacccaagggcgcccaagcttctaatttaacatcttgtgccgcgagtaattggcgcaagggttgttgctgaaagtacgggttaaattcaacctgattgactgcagggatcgtttcaaattgtggcacaaatttttgccacaacgttggtgtcatattggaaacaccgatcgactttaatttcccggccttttgggctgcttccattgcttgccatgcacccggaacatcgccataaggttgatgaattaagtacaagtcaatatagtctagtcgcaacttagttaacgaacgatcgatggcgcgactggctgcgtcaaagccgtagtcttggagccaaagtttactcgtcacccagatttggtcccgtggaatcccactatccttaatagcttgaccaacttcgtcttcgttaaaataggccacggctgtgtcaatgtgtcgataaccaatcgccaatgcttctttgactgcttgataagtggaaccgtcgtctggaatctggaaagtgccaaacccaattgctggaatcgcgcggccatcatttagcgtaatagttggtgtttttgtcattaataatcactccttaacttattcatgtaattgtcgtaaactagcgccaaaaatctgttcaattgtcacaggatcacgatgatcaaagaactgactgacgccctgatcaagttcggccattgctgacatttctgcagctgttaattcaaaatcaaaaacagcgatattctcagccatacgttcaggatgcactgattttggaatcaccgtaatcccgcgttgcaacagccaacgtaagatgacttgtccggtcgtcttaccatgggcctgtgcgatagtttgaatacttggattactgaaaatcgcatgcttaccttctgcaaacggtgcccaagcttcaacccgtacgtgttcatcttgattaaagcggacctcgtctgcttgctggtaccatggattgacctcgatttgattgacagctggttgcacggacatggtcagttccaagttctttagctgatccgcataaaaattggaaacaccaattgcgcgaatcttaccagcatggtaagcctcttctaaagcacgccaagcacccatcacatcgccataaggttggtgcaaaagatacaagtccaagtagtctacgcctaaacgttgtaatgacgcatcaataccttgctttgcacgttcataggtgaattctgagacccacagcttggaagtgacaaagagttcatcacgtctaagaccactcttttgaattgcccgccccactgcggtttcattttggtatgccgttgccgtatcaattaaacggtaaccagcctttaaggccgcggtcaccgctgcttcacattcattcaggtcagggacttggaacacgccgaatcccaattggggcataaccacaccattgtttaatttcgttgttggaaccatcacgcatcaacctttcactatttgattacaataacaagcatacccgcaaacctaatacttgaaaattactacttattcatactagtatacatatagtgcatactagtaacggaggttcctgatgattgaaaattatttattagaagagctgatcacattcgcccacgagcacacgctggctaagaccgcggccgcattaaacgtgacgcaaccaactatcactcgcggcatgcagaaattggaaacaatgctcgctgttcgcttatttgatcgtcaacccaatcgaattacactgacgcccactggccagttagccgctcaggaagctgaacaattattgacacaacaacggacttttgtaaccaaaatacaaaactacgagcaaagcttagtcacacgtaccgtcgaaaccaccctacctggtccacttgccttactcacccatctcaaaacggtattacctaattcgctgcgagtaaggcaaccactgattgccgacgaccaaatcactgagcatctcattaaccgccaggcaagtttcattttctctaatcaggaaattctgacggccggcattgaatctcgcttcatcggtactgaaaatctcgtggtccatttacagcgattcatgtaccgtgcgaaccaacctagcatcacgttcgccgaacttaagggaattagcttcgtggttctaagcgcaatcggtatttggaaagatattattcagcaggccatcccagatgctaaattcttataccaaccccaacgcacggcctttacagaaatcactaaatactctgattttccgtacttcagtactaactttaccgcattggcgcctcaccagctggatagccaagccgatgatgacaatcgagtcgctatcccgattagcgatactcgtgctcacatgccaatctatgtcaattatcttgttagcaatcgacaatcattaatgcccctattcaagcaatttgaagccgcgtggccagccaatctcaagcatacttccacgtcctagcagctaacataattaagccgttcggtctaaaactgcaaaatgaagtgttacgctcaatcacagggggtatatactggttgaagctcgccctcccagttcttgatagcaaaagaggtccacacgctcgcttagctaatctaatgcgagcgtgtggacctcttttcatattaagtttggttcgttcaagtcttaatcttaaacatggaccctaatgtgatgattagttgcagaaaaaacagttaaacaagcattccacgccaatcatcttctaacagcaagccgtttagcagatttgaactgccgacctcttccttaccatggaagtgctctacctgctgagctaaaacggcgttaattgaccctatccagtataccaaaagcatgtttaaattcaaactgtactggttgacattcaacgtaaaaaaaaggaaccgaattaacgattccttaggttgcatggcaacgtcctaccctcgcagggagcgatcccccaactactctcggcgctaagaagcttaacttctgtgttcgacatgggaacaggtgtatccttctcgccatcgtcaccacactattgagaaacttgtgctctcaaaactagctaatatcaaatatcttcatatgaaccggaacaccaattacttggttaagtcctcgaccgattagtattagtccgcttcatgcgtcaccgcactgccacttctaacctatctacctgatcatctttcaggggtcttacttccataaaggaatgggaaatctcatctcgaggtgtgtttcacacttagatgctttcagcgtttatcacatccatacgtagctacccagcgatgcgcctggcggcacaactggtacaccagaggtatgtccatcccggtcctctcgtactaaggacaggtcctctcaaatttcctacgcccgcgacggatagggaccgaactgtctcacgacgttctgaacccagctcgcgtaccgctttaatgggcgaacagcccaacccttgggaccgactacagccccaggatgcgatgagccgacatcgaggtgccaaacctccccgtcgatgtggactcttgggggagataagcctgttatccccagggtagcttttatccgttgagcgatggcccttccatacggtaccaccggatcactaagcccgactttcgtccctgctcgacctgtctgtctcgcagtcaagctcccttgtgcctttacactctgcgaatgatttccaaccattctgagggaacctttgggcgcctccgttactttttaggaggcgaccgccccagtcaaactgcccacctgacactgtctcccaccacgattagtggtgcgggttagagtggtcatacagcgagggtagtatcccaccaacgcctccaccgaaactagcgttccggtttctatggctcctacctatcctgtacaagctgtacaaacactcaatatcaagctacagtaaagctccatggggtctttccgtcctgtcgcgggtagtccgcatcttcacggacaatataatttcaccgagtctctcgttgagacagtgcccagatcgttacgcctttcgtgcgggtcggaacttacccgacaaggaatttcgctaccttaggaccgttatagttacggccgccgtttactggggcttcaattctgagcttcgccgaagctaacccatccttttaaccttccagcaccgggcaggcgtcagcccctatacgtcatcttacgattttgcagagacctgtgtttttgataaacagtcgcctgggcctattcactgcggctgatcttgcgatcagcaccccttctcccgaagttacggggtcattttgccgagttccttaacgagagttcactcgctcaccttaggattctctcctcgactacctgtgtcggtttgcggtacgggtagttaagtactcactagaagcttttctcggcagtgtgacatcagacgcttcgctactaaatttcgctccccatcacagcttgtccttaaagtgaaaagcatttgactcttcacaagacttactgcttggacattctaatccaacagaatgcacatcttagcctcctgcgtccctccattgctcaaacgcacttaactagtacaggaatctcaacctgttatccatcgtctacgcctctcggcctcgacttaggtcccgactaaccctgggaggacgagccttccccaggaaaccttagtcattcggtggataggattctcacctatctttcgctactcataccggcattctcacttctaagcgctccacaagtcctcacgatcttgcttcaccgcccttagaacgctctcctatcacgcgacctaatggtcgcatccatggtttcggtagtatgcttagccccggtacattttcggcgcaggatcactcgactagtgagctattacgcactctttaaatggtggctgcttctgagccaacatcctagttgtctatgcaactccacatccttttccacttagcatacatttagggaccttaactgatggtctgggctgttcccctttcgacggtggatcttatcactcatcgtctgactcccggatatgaatcaatggcattcggagtttatctgaattcagtaacccaagacgggcccctagtccaaatagtgctctacctccatgatcctaattccgaggctagccctaaagctatttcggagagaaccagctatctccaagttcgtttggaatttcaccgctatccacacctcatcccagcaattttcaacttacacgggttcggtcctccagtgcgttttaccgcaccttcaacctggacatggataggtcacctggtttcgggtctataacctcgtactcaaaacgcccatttcagactcgctttcgctacggctccgactttttagtcttaaccttgcacgggatcataactcgccggttcattctacaaaaggcacgccatcacgcattaacgcgctctgacttattgtaggcacatggtttcaggaactatttcactcccctcccggggtgcttttcacctttccctcacggtactggttcactatcggtcactaggtagtatttagccttgggagatggtcctcccggattccgacggaatttcacgtgttccgccgtactcaggatcctgaactgagagaatttgatttaatctactgggctatcaccatctatggcggattttcccaaatccttcgactatcaagttctttggtaactcaaatgttcagtcctacaaccccaaagtgcaagcactttggtttgggctgttccccgttcgctcgccgctacttagggaatcgaaatttctttatattcctgctgctaatgagatgtttcagttcacagcgtttacctccaactagactatgaattcatctagtggtaacagttgattaaaactgctgggttgccccattcggaaatctccggatcatagcttacgtacagctccccgaagcatatcggtgttagtcccgtccttcatcggctcctagtgccaaggcattcaccatgcgcccttgttaacttaacctcatttacctaacggtaaatgcgattaatgagtttagcgataattaaacttcaataaaaaactcaaaaaacgcggtgttctcggtttcattatgaaaaaatatatttgatattatctagttttcaaagaacaagttttgagagttaaatctctcaaaactaaacaaagtttcgaagaatgtgtaggtttccgtaatattccttagaaaggaggtgatccagccgcaggttctcctacggctaccttgttacgacttcaccctaatcatctgtcccaccttaggcggctggttcctaaaaggttaccccaccgactttgggtgttacaaactctcatggtgtgacgggcggtgtgtacaaggcccgggaacgtattcaccgcggcatgctgatccgcgattactagcgattccgacttcatgtaggcgagttgcagcctacaatccgaactgagaatggctttaagagattagcttactctcgcgagttcgcaactcgttgtaccatccattgtagcacgtgtgtagcccaggtcataaggggcatgatgatttgacgtcatccccaccttcctccggtttgtcaccggcagtctcaccagagtgcccaacttaatgctggcaactgataataagggttgcgctcgttgcgggacttaacccaacatctcacgacacgagctgacgacaaccatgcaccacctgtatccatgtccccgaagggaacgtctaatctcttagatttgcatagtatgtcaagacctggtaaggttcttcgcgtagcttcgaattaaaccacatgctccaccgcttgtgcgggcccccgtcaattcctttgagtttcagccttgcggccgtactccccaggcggaatgcttaatgcgttagctgcagcactgaagggcggaaaccctccaacacttagcattcatcgtttacggtatggactaccagggtatctaatcctgtttgctacccatactttcgagcctcagcgtcagttacagaccagacagccgccttcgccactggtgttcttccatatatctacgcatttcaccgctacacatggagttccactgtcctcttctgcactcaagtttcccagtttccgatgcacttcttcggttgagccgaaggctttcacatcagacttaaaaaaccgcctgcgctcgctttacgcccaataaatccggacaacgcttgccacctacgtattaccgcggctgctggcacgtagttagccgtggctttctggttaaataccgtcaatacctgaacagttactctcagatatgttcttctttaacaacagagttttacgagccgaaacccttcttcactcacgcggcgttgctccatcagactttcgtccattgtggaagattccctactgctgcctcccgtaggagtttgggccgtgtctcagtcccaatgtggccgattaccctctcaggtcggctacgtatcattgccatggtgagccgttaccccaccatctagctaatacgccgcgggaccatccaaaagtgatagccaaagccatctttcaagctcggaccatgcggtccaagttgttatgcggtattagcatctgtttccaggtgttatcccccgcttctgggcaggtttcccacgtgttactcaccagttcgccactcactcaaatgtaaatcatgatgcaagcaccaatcaataccagagttcgttcgacttgcatgtattaggcacgccgccagcgttcgtcctgagccaggatcaaactctcaaattaatgatgagttctaaaaagctcatttaatgttgtactaaaatttatttgctagcgaattgacttcgcaaatgttttgctcttgattcaaaatcaagagaccctacacatttgattcgtcgaaactttgttcagttttcaaagatctaattccgtgtgttaatcgcttaacacaacttaatcatcataacatcttaatcaatatcttgtcaacaacttttttttaagaagtaacttgattaatttgtcatagttgccgttgcgacaacagaaactatcttaccaattactgaagaaattgtcaacaactaatttcaataattatttggtggtgagatgcatctgccgtagcagcaacgtttactaatataccagccagttatgaaactgtcaacaattaatccaatgttttttcacttttatgaaaagaacggcacaaaactgtcgtcaattacacaattactacattatatgtcatcgattaacatcattgtgagatggcactatgttttccaatttaaggattccctttagacagcaaaaaagcgcccgtaaaagcacgacgaacgcttatcttaagccagcacatctaattttaaaaattcaaatgacgtttaacgattggtcgaattcccgcaacaattgggaacgccaagataccaccaaccacagcttgaactaaattagtcggtacaccaaccaatccagttgccatcgtatacaacagcgaatctgacaaaaagtatccgaccaccatcaccactaccgcagtaattatcgctgcaatctgtcgaccatgtgatttgctagcaccaagatatcctgctattccgccctctaaaccatgaacgagtagtgagaaaaacatatactgtggataccctagcaataaatctagtaatagtccgctagcaccgccaacaatgaccccaccacgccagccaaaaatcagtgctgcaataaagattcccgcatcacataagttaatataaccgtgtgtcatcgggattgggatatggaaaaagatagaaataacaacattaagtgcgatcaacatccccaggattgcaatcgtccgtgtattaaatttaacccccaccaaaactttcatctcctcaattgattttcatctggcaatgatcacacattattaatgtgacctaaataaattttacaccagttcttacttgtaataataataaaaagactgggccacaacgggtccagtccacctgctaaattaacttacttaacatgtgccaagaagtaacgtttcttaccacgacgtacaatgacaaatttaccattaaaggctgcggacggatcaatctcggcctcgacatccgtcaccttttcaccattgattcgaatcgcaccgtttttaatatcttcacgtgcttgacgccgagaaggttcgaatttcgtagcatcaaccagccacaagacaatgttttgcttttcagctgagacgtctgctgatggcacacccttgaaaccttgttcaatttcgtccgccgttaaactttgaacatcaccagtaaacaacgccttagtaatattttcagcttcaactaccgcctgcttgccatgaacaaattccgtgacttcttcagctaagcgccgttgtgcttcccgtttttcaggtgcagtcttcaccgtttcggccaatcgatcgatttcttcatgacttaagaacgtgaagtacttgaggtatttgacgacgtctcgatcatcctggttgatccagaattgatagaattcatacggtgatgtccgttcagggtttaaccatacggccccaccagcagtcttaccaaacttagtcccatccgccttcaacaataatggaattgttaatccgtaagccttagcgtcattgccttctaagcggtggatcaaatcggtccccgcggtgatattgccccactgatcagccccaccaatctggagttgcacatgttcagcacggtacaagtgtaagaagtcaactgattgtaagatttggtatgtgaattcagtgtatgaaatgcccacttccaaccggcttgcaacaacttccttgttcagcatcgtgttcacactgaacaacttaccataatcgcgtaagaaatctagtaatgaaatttttgataaccaatcgtagttattcacaatcgaaaagttttcgtcatgaccaaacaacttgtacatctgagcacttaagccatcctgattatgcttcacttgatccatggtctgtaacttacgttctgagttcttaccagatggatcaccgatagcacccgtcccaccaccaactacaacgtagggatgatgaccagccaattggaatcgtttgagaatcatgaaaggaatcaaatgcccaatatgcatactatccccggttggatcaatcccacagtatagtgagactgattggttttcggtaagttcctttaacccggcctcatccgtttgttggttaatggcaccacgccattttaaatcatcgataatgttcatgttagtcctcctcgttattgtcgctggacaaaaaaactcgcccctgtcatcaaaacagggacgagttttccgcgttaccacccaagttatcaccaaatgtgatcgctcattgattagtaacggatatcatccggccaatggcagttcacgttatgtaattcatctttgaccacagctcggttcgcaccacccaccgagtcgctagactgttgggtcaacgactactaattaacgatcactactttttaattattacctaacatcataagcactccactgccaaaagtcaatcctattttcggtcaaaacatcgcattaaacccactaatctaaccatagtgtctggcttgtgaatgcggttgacgtcgacacagtgatataaccagactactggcactcatttattgagctcccaggtaaaaacttaatctttagcatccgccgcaattttgataacggtattggcttgctggccttgaaccttagcaacctgtttgccattttgccattgaactgagtttgcctgtccgttttgtggggtatcgtacacggtaacggcaccactcgtgacatttttactcgtcaaatcttgcttttgaatctgattattgacctgattagcaaacttggttggattaccagcaacgtcctgtgtattggcaatcgttgtcactgaccaactacccgtgttccaatgaacatacactttgcccatcgtcccttgaaccgttgccgctgtacctgaattaagtgtcgtacgctgaccctgcgtattcgctaagtaatcgacttggctgctggcatcacttttcgtattgtagttcgtctgttgatacgtcgcagtcgtcgaactagtcccagctttggcgtacttcacccggtagtttcccttggtcccacttgcactgatggccttgactgtttgattggttgccttgacggtcgtaggcgctgccgtctgactaaccaaactaacactgtctgaagccgcgtgtaatacattcgttactgaaggtacggcaacaattccgaccaccaacatcccagttgcagtggcgattcctaattgaattttgcgcttaaagttcatgaaaaatatcctcctaatttctacaacaaatgaccgattttacttaaccataattaccttttctaccatgataatgagaactgagcgacagccatgcaatcagctaagtcctcgcttgtcccgagaagtgttatgtacgggacgtatttgtgttcgttgccgacgtggtgcacgacgaatcgtcgaccctcgccgctgcaccgttactcgtagtgcgcggcggcgggattgcctgtttttcgttactcgctgcctcagtgacggttgacgtcgcgtaagtcgctgccgcgttcgcccttttgaacgagtcaccggttttgttcgaatactcttaccgggccgccgaagtttagttgctttggacgtattcagtttaaactgtgttcctgtacgtcgcgtcgctttaagttttatcactttgggctgagtcgctcggcgtcgaatggcgcgatgctgagttattttgccatgatggctgttaacactgatcgtttgcaatgaccgccgtttgacgcgcgccacggtctgcgaacgcgacttattgcttaccactttctgctgcaccggccgagtcttcacagctggctgaactgctggcctcttaatggcgacaactgcttggcccgcccgtccatgctgttgattgtgggccggcatagtcaaatggcgatcgtgcacaactttcagtcttggttgagctttaatcgcaacaccgggtgtgccacgggtcgtccccaaccaccacgaaacgggatgaacactagtaatgacccgactattatcaaccggtgccgctagcccagctaaatgatagcgattggtatactgccataatgccgccgaaatgattggtgggttaggcgttagcgcaccaatccactgggcatcaaaccgttgccgcgcttggttggcatacgtcagtgcgaacgaagcatacgaatagaagatcagttttttgttagtcaatgcgcgcatttcacaataccaagccgcaactgccgcattagttgatcctgaacgtaccgtattaacttcaaaatccaaagcataaaaacgcgcagctttattggagcgcgcataaaacgcttgggcttcacggcgcgcgctagcggcatccgtaaattgcgaaaaatcatactcaccaaatggaatcccataacgaacatataatgccgtattattcgctgcgtcccggtcaacataatttaaaccatactgacgacgattgatcacaaatagcacttgcgacttcatcgcctgcacctgacttgggctgagctgtccttgccactcggaaatatcgaccaccgcgtgtccctgtgcttgaaccgtaatttgcctgccaagtgtggcgaccaccgccgttccaactaaccaactgagccttttaatccccatcatgcggtccctctccccatactgtgctccgcaattaaaaaaattatcatcataagttgttggtgattcccacaatcaccaacaactaaactatcaaggacagtttatgacatacccataactttaacattcttatactaccaataataggccatttttaatgggctggggcgtcaattcgatttcaattcagttacagcttgttaacaaagcgtcgcccctttatggttaatattatgaacaactctggaaaggctgatatttgaattacagtttggttacaatcatgatattgttagcagtttctcacccgctttccggtgcccgaactacccataccacgggatattacaaccgtttcattcgaaaataccgccacaaaaaaacaactaaccctcatcaagattttggctcatcttgaccaagattagttgcttaaactaattggttcacaatagcatgttgttaactaactaatgtggtaacgtcagaacaatggcttgcttgcccatctgattataagcagcctcaaaattcttccagctgactgcctgctgtttttctccgtacggattgttaatataaatcaactttttagtccggttaaagccaacaatgaccacgctgtgcatatcataagtcactttaacggagccctgtggtgtctgccaagtttgcatcgtgctgaccggtgcaaacgaagccgtcgtaattgtccaaacgggccgtccttgttctaactgttcaatcacagtatcaaagtttgcccccgttaagtccttcacctgactagtctcagttttcgccaatttatagattggcttatgatagacacctaacccaggatcgttaccagtaatatccccaacaaacccatactctggattcccatgttcgccgtcactataagtgagtggcacactcgtaatctttgccgctaattcatttttagtgacattgatatgcgcgtaattcatcaacatcgttaacgatgtgacttcacaaccattgtataaacgtggtgttgtcatttgattcactagcgggacgtccaacttgacctgattgaccgacttgggcttcgtttgggaactagacttagctgcatccgtttgtttagttgtaaacgatgcatcaatccagtcagaaacttgtgtgcttgtaaatccaatgacccccaaaagcaccatggcaattatgatcagcgtccaggaccggcgccgtttccgtaaatgtcttggcatttgttaccatccgtttctcttttaatttgattgactactttcctaacatactatgtagtatcataccatggacgaatcaataatacacctttacaatcttaaaaaaaaggcttgtataatcagccgtaagtcaatgctgacaaggattaaggttagcctggttaatcattaagcagcacactgctttaatcagtttattgatatattagtaaccttattatcaatttgttgaattagccctgaccgttacttagattataattgagattatctggccgaggctggcttttcccaaaatggccttgaatattcgttatttgccgatgaagtcaattttcctaattctgggcaccttcgttattttatgaagcactgagtccttgttttcaaaacagcattaaattggccccggcaaatccgttgcgtccttagattatctgtcatccgtttcaagcctagtggcatccaaagttttaacttctgatcagctttagaaaattttatgttgattaaagcgctttctttattacaatagtagtaaaagcagttaaattttatggttaattgtgaaaggacctgactggcatggctaattctgaagaccaaatggataaacacttacaatccgcaatattcggggcccccgtactacatccggatgaacaacaccgtaaccttggcacgtttcacgaacgaatcgatgtgggcattactttcacccaagcactcatgcgtgactactcaaccgaactaaaaagtgaaatggcggcccatcctgattaccagctactcctacatggcttgctagatgaagacatcctgaatcgctacgttaaactagccaaccagcagcacatcaggtttgcgattcgaaatgacctcatgtaccagcacacacctacgagcctcgccatcgccctagtcgccaactgtgccatcacgccaccgacaatcgatatcgatgaacgttttcccgttccgccacttaacacaactaccgattggtcgcacgacgtcctcatcgatcacattcaccgtcatctggaacgcaatcgtcaactcttcagcatcaaacaccacttaatctaaccagtgtcttactttgacatctattgtgcgtgttgacatgaattatggttaaaacaaactgtttaactgcattattttccgtcagccggtgcgcgtcctatgccgacctccggggctgggtgacaattgctggaacgcagccgacgtcgatttgagctaacgcccaacccgcgtcatctcaaatacgagtcttattctaagccggaagcaacccacttccagctaagaataatttggctactgagcattgtcacccagcccctccagtctcaagcctgtgaggggccacgggttgaagccgctcgaatggctgatgaacgaccaccgaacttagcacaatctatcgttggctattttgatactggaacttcaaacaaagtgttaggtgcattagcactttgtcgagagattacatcttactacaccaattcaggattagtgagctatctcaatatcactttcagtctgacagttgattaacaaaattatcgtttatgaaaagcaacgacgaattcatcaaaagcttaggtacatctttgtccgccattcgaacactatcccgactggaaggcatttcggccaatgctcagcggtgaaattccacttagcaagcgtccttggcttggttagtggaagaccagtatttaagacgtggtttgcggcttaaatctgtgtccaccgcgttccagcaattggccgaaatgcctggaagtcggtgtaggacgcgccaactaagcaattttacgcttactcgacttttttccagcgggcctaagctggttgcttttgatttaaaaaacagtccgttttaaccatatttaatgccaatctctcaaatcgatgcattatacacaaagccaccaacttaaaatgatcagctttcactgattgtcctaaattggtggcttttactttatcaatcaaaagactcaattgacttcaccattggcccactagttaaaataattgcatcacgctaattacgattggtggcactagcaaggctggtaataggttcaacgtactgaattgcttgattttcaacatacctaagccggatgctagaatcaagataccaccaacaatggtaatttcattcagtaacgctgcactcaacgcacctttcaaaattaatgctaaaacatacaggctcccctgccaacaaaacaagacgcccgccgcaatcgcgatgccaaatccgaaagtggatgctaatacgatcgacgtgatgccatctaacatgccattcgtaaacaaaaaggtgtaatcatgctttaaggctgcctcaatcggccccaaaatcgataacgatccaatacagtacagtaacaccgcagtcgctaggccttccgctaagttgccacccgccaaacggcccacccagcggtcaaaatgcccttgaatatccaaagcttgaccaattaatccaccaatcgccaagctcacaataaaaagcaccgggtacttactctgcggcatccgttgcacgaccgcattaatgccgatgacacaagccgctagccctaacgcttgtaataatatcgcatggtaagctggcttgattccttttttaaagatactgccgaccaagcaaccagctaaaatcatgctcgtattaaaaatcgttccaatcatatcgccactcctaatcaatagcttaatctctagcgcttatttcaatttaaaataattaattatcatttagtataaagtctaaagttacttgagggtcaagtcttgattggtaattgtatctgcgtcaccgactgtgcaacctgatctgtaatcccataatcaatcagtgctgtctcaatagctgttcccgccacgtgccagccgcgagcacgacaatccgctaacaattgtcgatactgcatcggggcatccaaatgagtgccgtgaaaaatccgctgcgcatagctaccagccgccaagtgttcttgatggggtggcaccgtatcacccggttcaaataataaacaaattcccgcatagcggtcaaaatgtccggcttggatggcttgctggtcgagcatcagcgcaaccttgccgagaaagatttcgttcgtcgcgccggtctgtgcgcgtagcttagcaataacaagttcaatatcatcttgagggcgataaggctgacgtaaagccaccatcgctctttcaggtaacgtcacgcattcagtcacatcaaaattggcactttgggccgttttaatctgggccaagcgtgtattgatccgttgttgtaccgccgttaataatcgcaattgcgcctcaacctgctgctgttgggtcgttaacatactcgtcagcttggacagttcacgggccgcaaaaaaatcggcaatcgtagccaatggtaagccgagtgctcgcaaatatttaatggtactcaaccgttcgaactgaggcgtcccataatatcggtagtgactatgcggattgactcgtgccggcgtcaataacccaatctcgtcataatagcgtaaagtcgccactgggatatcaaataactgtgcgagttgcccaatcgaaaaatcagttgtcatccgatcgccatcctcccctataggtcttatcataacttaatcgctgaagtaattgctgtaaccagaataagatatcataaaaaaagttgcatttcagaaattaatttctgaaatacaacttttgggcctatcaatcatcagtgatcatcgccatcgcattattaatgcagaactaactgacagagctgttttcaattatttcgtaattgcgcgcgcatgccccgcccgaatctcagctaaatactgatcacttttggccgtatcaaattcatgttctgacttaccgataattaccgcagctaatgaattgccgaccacgttaaccacggttcgtcccatgtcaactagccggtcgattcccgcaataaaagcgagtccttgtactggcacgccaatcgttgaaatcgtcgccaataagacaacaaacgaagcccccggcacaccagcaatcccctttgacgtaatcataagtacaatcaataaagtgatctgctggctgagtgacaggtgaatcccataagcctgagctaagaaaagcgccgctaacgattgataaattgcggagccatccaagttaaacgtatacccagttgggatcacaaatgagacaattccttcactaacaccgtatttccccatcttatcgataatgcggggcagggccgcttcagaactcgccgttgaaaagccaagcaccatttcatcacgaatgacccgtagtaggtgccaaatatttaaaccgaataacttaccaacaatgcccatcacaaccacaataaagattgccatggtaatataagcaagaataatgaaatagcctaacggggccagcgccttcaagcccatttcagcgaccgtgaccccaattaaggcacagacgccaatcggagccgtgtgcatgacccagttcgtcactttgaacatagcttcggcgacagcgttcataaagtccagaataattttgccttgttcgccaatagccgccgtccctaaaccaaagaaaacggcaaaaaagatgactggaatcatgtcaccagctgacaatgatttaaagacgttagtcgggataatacccatgaccgtcgaccaaataccattgtgtgagaccgtcttagcggtttgcacatactgactaatattcgacgcatgtagttgatgaatatcgatatagtcaccagggtgaaaaatgttacccattaacaaccctaaggcgatcgcaatcgtcgtcatgatttcgaaatagataatggttttaccaccaatccgacctaactttttgaggtcgcccatattagcaatcccggtaatcagacatgccaccacgattggtaaaacgatcatttgaatcagactgatgaacatcgtcccgatgttttgcatcgcagtaatcgccgttttattgccataaaagacgacccctaatacaattccaagcactagcccaattaagatctgccagcccaagctcaatcggaactggcgataccgcttcatctttccctgcttttccaagctacttccgccccattctcatttatggatgtttttatgaaatattgcacacaatattaatattttagcacattttcagtcaatatgagaattaaattaaaaaatcaatcattaaaatcaaatggtcccattgtaatagacgttaatctcagttgctttcctcataatcacgtaattgtcgcggtgaatcactatttccgttaccatcagaatccgaacattaaccaaaatagcgacaattaaaactagcttggttagcagttgtaatcattcctaaccaagctagtttttcaagcaacaactttattcaacggctgcggctacaacacctcatcatgtcgtcactcactaaccgatttaaaccgctatttggaacgggtcatccggtcatagacagcggcactaacccaatcagcggtccacatccataaaacatgcccaatggcttctgacacgtgttcggtcattggttgatccttcgcagcgggaacggtccccagtgctggcaagataccatggtgaaaggctgtccagatacctaacccatacaacgcgctgctgccaccttttgcccgggggtgcttgcgagcccataaactataggccacagcaaacgtcgttgagaatccgaaatgcatgacatagctgacacctggtaaatcatgaccagaatatgaatacgttgcatgcgtaacgctggcgggaatcccaatttgttgcaataattgttgtgggggattcgtttgatcccgctgtggcgttcgtggcggtaggatattctcccaccctaacttaactaaaccagaaatcacaccaccagtcacaccagcaataactgcggcccgatgattgaactgcttgttcaccattaataattacctgcctctctattcaataaattaatcataccagccttggtacccatttcgaaataatttagcctggtaattaaataaaaaatttgatttacaaaaatgaacgtgatacgattaccacattgatttatcacttgataaatgaaattaaaagggaggaattgacatgtatttaggcttaaaagaaatggcccacgaaaaactcagatatgggctacttagcggggttttgctactaattgccctcgtcgtctttatgttagcgggccttgctaacgggttatccaatggtaatcgtcaggctgttgaccagtggcatgctcaaacagtttatttgaacgaagatgcgaatcagacactgtcagcatcccaattaaaactagcagaccaagatcgaatcaaaggtcaggacgtcgcacccttagctagtctgtccggtactttacgaactgccagtaatggtcaaaaaactaacgctagcgcttttgggaccactcgcgatagttttctgatgccaaaagtcatctcaggacaccgaatcaacggcaagaatcaattattgatttccgcgggattaaaagacaaaggctatcggattggtcagaaagttcgcattgggaccactgatcaaaaggtaacgatcgtcggtactttcaaagctagtacctatagtattgcgccaacggtctacacggacgttgccacgctcaatcgtctcaaaggtaatcccatcaccagtggcgatcaacaaccggtcaacgcctttgtgactaaaaagagtcatttcaagactcaacatcatggcaacatgcaacgtttatcaattgccacgtttattgaaaaattaccaggatacagcgctgagcagttgacactcaacacgatgatttacttcttgttcgcaattgccctagccgtgattggaattttcatgttcgttctgacccttcaaaaacaagccttgttcggggtcttaaaagtacaaggtattggtaccaaacacatcttggctgccctactcacccaaagtgtcgtcatggcaatcattggtatcggcatcggccttctaattacgttaggcctcgcgcaaatcatgcccgccggattaccattcgccattgactggccacaatttggtatttatagtgtggctctcttgttagctgcagtcgtcggtgccttactctcatggcggactgtcgccaagattgaccccgtcgttgccattggataaggaggatgatatcaatgagtcaaccagttttagccttacaaaatattaataaacaatttggtcacggtcataccgctgttaacgctttgactgatgccaatttcgaagtcagtgctggccaattcgtcgcgattatcggcccctctggctcgggtaaatccacctttttgacgattgctgccggtttacaaacgccaacaagtggtcaagttattctgaacggacaaccactatcgaatcaaacggaaaaacagcgcttagcctaccgtttcaatgaaattggctttatcttgcagagttccaatctgattccattcctgacggttcgtgaacagttcaagctcgtcgataaaatggcccggcgcaaatttgatcaagcaggcaccgatgaattactagcagagttagcccttactgaagttcgggatgcctacccaagtgacctctccggtggtgaacgccaacgtgttgccatcgcccgcgctctttacaatgatccaagcgtcattcttgcagatgaaccgaccgctagcctggacacgccccgctccatcgacgtcgtcaagcgcctcgccaacgaagctcatcagcaccaaaaggccatcgtaatggtgacccatgaccaacggctgattgatgactgtgacgtggtctatcaaattgaagatggtaagatgagtcgccgcgactcgtagtgctactgaccactgcactttaacctcataacagtaaaaatgacctcgccaggaatgttcctgtgaggtcatttttactgttcatattcacacgactcatcagatactacgaatcgaaaactagaatttgccaagctcaaagacagccagcttcggcccgctggaaaaagtgcgagttagcgtaaacatgcttagattggtcatccgacaccaagtcatccgttcgactaattagcttgcggcaatttatatcgcaacgcgcggtaaacaagtgcgaccacgtacaccgtgataaaccgatctagataatccgttcccacttgtatcaagaagacggccatcgttttgcccataccggtacctaataataattggactagcatgctcgaaccagacgacgtgatgccatgaaataagatgaccgtaatcgccgtggataaaagtgttccgggaagtgaaataacgccagctaaccaccaatttgaccgccacgtgcccggcttgattcgccgatatagcagaccagcaactaacccagtcagcagttgaacgggcataaagaacagcgagtacaggtctgtcgtcgcacccacgataactccggtggcacccccggccaacatcccacccagtggtccaaacacagcagcagccaaaacggtaccaattgaatctaaataaatcggtaattttaacatcaaggcaatgttactgccaacaatattcagggcaatgcagagcgccaataacgtaattgcccgcgtctttattctcttcatgcactcaccaattggtgcaagacttgcgttaaatcaggatcagccgcaccgaccacagtcgttaagaacaaccgccaaaaagctacgacgtcaaccttcgtcatgatttgactattgggtgtgttgtgccagaaatcatgatcatccacgattgactgcccacgcgcgacaccatccgtcacaaccgtcgtgtagctttcaaagccactcagaatcgttgggtcaagcattccggccacggccaacggatcattgatcacacaaccaataacccgttcatatttccaatgaaagtcaaaataaaaggttgtaattttctcaacaaaagcccccattgctggattgacgtctttaatatacgttaataaactgggtgtcaacacgatgttacgcgtgacgtctaaaccaaccatctgaatgggaacaggcatcaagtcaaagacgaccttggccgcatccgggtcacaccagaagttgtattcagccactggcgaacaattaccgtgactccgataacttccacccatcagtgtaaattgatcgacttgttcaaataagtgtggatcacgttgcagtaccgttgcaatgttcgtcaacggtcccaacgctaaaatcgaagtatcaggtgcttcaatcagcgtctcttcaataaaaccagcggcatcttgaatcggtcgtaccgccgttaccgctggaatctgactattccctaagccatcatcgccgtgggtgtcttgcgcactcgtgtaggcgacttccaatgggcgattagcgcccaaatagactggaatatccaatcggtcagccaaatctaaaattttcagtgcattttccgcaccgatatgggttggcacgttcccacaaacaattgtaatcccaatcacattaagtgccggtgatttaagcgccaataatagtgctaaactatcatcgatcccgggatcacagtcaataataacgttacgcgtcgcattcattctcttacctccgataactgaagttcttggttttttatcctgggaagtttacgaaccaggccagctcgcctaattaggtcaaactgtatgtgatgaaatgctaatccaattatagcggacggtggggcccttgaaaaccaccaatcgttacttcaactcacatcttgattgcccgtatgctacttctccgacaatgatcaccacgacctgctcaacccgctgtggatactcattctcattagccccacaacatcattatttgcagcattcacacgctcccagcgacaccttaagtagtttcccacctcccatttcgaaccaattatttaattatgttactgaacttttaccggagttcagcaagtgaatgaccggaaaacatggtacaatatgactactaaagataaagtaggtgtcgaatcatgcgtaaagttcagttttatggggccatttcaattgacggttgtttagccactaaggataatcggctggactggctgttcaaaacagctggtgccaacgatgcccccaccgaagcatttatgcagcaagttgataccgccatcatgggccgccatacttacgaatacacgatggaacaaaccactgatcaactcattaatccatataatccggcgacccacaatattgtcatgacttcccacccccacaccggcgatgaacgcacccagttcaccaatacccccgtcacgaagatcgtcgaagacttgcgccgtaccgctggcaaaaatatttggattgttggcggtgctggcgtcttaatgccgctgttagctgcggatttagttgatgagctctacatccagattgcaccagtcattttgggtgatggtattcccttatttaaagcaattgaccagcaacagcgctttgaattagttgacaccaatcgatatggtcagctcgccgaagtccactatcaacgtttaacaactgaataatgtcgtgattaaaaaatcccagcccgtttgcaacacgcaaacaagttgggattttcaattgctttaagcttcacgttggcgtttaaccgcctgacgaagtaatagtggtgcaatcagcgtcgttaaaatgattgccgtgatgactgccgaataacgatcagctgatagtaatttgccttgataaccaatctgtgcaatgatcagggccatctccccacgtgacaccatgccggcgccaatctcatagccgcttaaccaattaaaacccgccaaccgtgcgccgaccccggcaccaatgagcttagtggcaattgccgcaacggtaatcacagcgatgaaccaaaaatcgttcaggaaaccattgaatgacatattcagcccaatactaacgaaaaagactgggataaatacagcattaccaatgggttgaatatgctcatcgataacttcatgatagtccgtctgaccaacggcgataccggcaaagaacgcgccaatcacagcacttaaaccgattgcgtccgctaagtatgagagtccaaaacaaatcactagtgacatcagcgtgatggaggttggaaccagtagggcattccccacggccattaaatgtggcaccacccacttgaccacaaagtacagcgccacaaagaacgccaactgaatcgccagcgagagtcccaagttggttgaggcatgactaccgccaccactgacttcactgccaaataagctgatcatcaaactcagaatcaaaacagccaggacgtcatcaacgaccgctgcacctaaaatcgtcgtcccttctttaccatcgagggcgcctaactctttgagaaccgcgactgaaatcgaaaccgatgtggccgcgaaggttacgcccaagaacaaactttcagtggcgttaaggtgaaatagttggctacaccagtcaatcaccgcaacgggtagaatgacccccaggaccgcaactaacaaactaggacgccaatacttcttcagcaattttaaatcgctctctaagccggccatgaacattaaaataatcacgccaagctccgcgaagtctttgataaaacttgttgctgagacccaacctaatacggctggaccaagtataattccacttaacaattggccaatcaccgcgggtaggcccattcggacactcaggtgacccgcaaccgccgtaacaattaaaatcaacgctaaactaccaacgtaatccattaaaaacctcctaaaaaagggcactgcaagctctgactacccaacccaaaagtagcccgaattcttgaagtgtccttcaaccgtaaaatctatcgtgcaattagtatagcatatttttatgagtctagccgtgacatccacttatgaaagcggttataataactcatatactgttaactgaaaggtcgcttagtcgtgttgaacattcctgattttcgtcaacgttttggttttttagtcttttccattattctgaattctgctgccaacgcgctcaccatcgccaccagcctaggcagcgccgtctggactggctccagcgttaatctagctgactggacccatatttcattaggaaccaccttattactgtacggtgtggttgtcacgattctcaaccaacttctgttaggtcactttgatcggcgtcggtttatctccaacttgctctatatcgtgccctttagttacctggtccaatttatcggctacttttgggattggctacagattcccgccctgcccctgttaccacgcttgattctaaacgtgcttgggctattaggcgttgcggccgccgtctcgatttaccagcgttgtaatttaattcagcatccgaacgatgatttatcgtatatcttacgctttcggtttttacatggttccgctattattgcccagtggactagttatttgccacctctgacgattatcgtcgtttcattcttcgccacaggtcatttgcgcgccattggcttcgggacggcctttgccttaattgctcaaggtgccatcatggggtggtctgatcatcatgtttttccccatctcaaacatcacgtggatattgtccaggcgcatcatccggcctaaatgaatcttgacaaagttcaggccaaacctcaataatgagagtattctaatttattggactgaagtaaatgaatttaacgcaactaactagtcaaatcattttgatgttcattctcatgctcgtcggcctgctcgttaacaagctcggcttcatgcatgcccagacttcaactgatttaaccaacatcctgttatacattgtgtcaccttgcttgattattcaagcctttgaaaagacattttcagccgaccgcttacaaatgttagcccgggtcattgctggaattgtgatcatttatgtgctcatgatcattgtgacgcaattactattcaaacgtgtctctgaccagaatttgcgtcgcattatgcgttacggtgccgtatattctaatgccggttttatggggattccattaaccagctccctattcggtgcaactggcgtattctatgctgttgcctcgttagcggccttcaatatttttagctggactcacggtatcaccctcttcaccggacaacagggcaatcggcgggataatcttaaacagatcgtctttaatccgaatatcatcgccattgttgttgggctactgatcttcgtaacctcgctgcaactgccaacgattgccaatagcgctattaaatatgtcagttcggtcaacacacccctgtccatgatcgttattgggaatagtttggcagacgttaaacttaaccgtgcaacactcgataaacgtctttggttagtcatcttattgcgcaatttattgtttccatacttggcgattgttgtcctccagctaatgggtatcactggcatcccattattcaccacagtgttaatggctgcttgcccagtcgccggaatcgtcgtcttgttctcgctcaaagtccacggtgatcccgggccagccgttgccctaatgagcatctcaacgattttaagtgtcgttaccattccaatcgtttttgctttggtcaacttacactaatgtgtctcactgcttttagctaagactaagtaaacgacaactaaaaatgagccatcagaatttttcattctggtgactcatttttaatgactagcatttgagatacggcttaaacttggatccactgcgttttagtaattggcagaaagcgcgctaactttagtttgtgctaagtcgtgcgacgtccattggctttaaactggctggtgtcaaccttcagcactagcctatctcagccataaattgcactgcaaaacagtggctactttgcaaccgctcgtagttgttcaataacctctgggcgtggctgagttagtccggccggcgaaaacagctgctcgaccaaagcatcgctaagcaagcgacgtcgatgtaataattcaggaattgcttggttagtggtgagcgcttctttaatcagcgcggtagtcgtctcgtaaccaaggtatggcgccaaaacagttgccgtaatggccgaatgtgccacttgatctgcacagcgttggcgattgaccgtcaattgccgcacacagtgatcgactaatgtagtcaaggcctgctgtaaatgctgctcactggttagcaatgcccgtaacataatcggctcgaaagcgtttaattccaattggcctgcttccgctgccattgttaccgtcgtgtcgtgaccaatcacttcaaacgcaacttggttaacaacctccggaataaccggattgattttacctggcataatagaagaaccagcttgctgcgcgggcaaattcaattcaccaaagccagcttgtgggccgctcgccagcaatcttaagtcattgctaaacttggaaaggtcaacggctaacgtcttcatggccgcagagaattccacgaacaaatcgcagttttgcgttgcatcgatcaagtctggtgcggctactaaatctaaatcagtattttgatttaatttcactaaaatctgttgttgatacgtgtgagtcgcgttgatgccggtaccgattgcagtcccacccaaatttacgattcggagatgttcgcccgcctgccgtacacgggtcaaatcacgcttgaataattggtaataagcatgaaaggtccgcccgtacgtcgtcggtaccgcatcttcaagctgagttcggccaactttgatggcatcttgataacgctgcgatttaaccagtaacgtttgtaccaaccggctgagtgccgttaatagtcctgggagttgcatgcaaagcgccattttaccggccgttggaaaagtatcattggttgattgtgattgattaacatcatcgttgggatgaacggcaactgccggcatcaatcggtgagccaaattagccaccacttcattgacgttcatgttagccgaggtcccagcacccccctgaatcgctggcacaatgaagttatccgcgtaacgccccagtagtaactgattacatgccgcaataatggcgtgtgccttatcattagacaaagttccggcagccgcattcacactggccgccgctttcttgatttgaacaaggctttgcatgatcagtggatgcatcaattccgtcgtaatcggaaaattatgaacggcacgtaacgtatgaattccatacaaagcatcatccggaacagctaacttaccaatacaatcagcttcaattcgcatagcaaaaccctcttatttagatttcatgttacatcttctaacatgaataattagagtttagaccattttctctgaaatacaatccttttaattgatttacgactaatattaagttcaacgccgattatggttaatattcattaagctcatcatcagcatacttcatattaattaactgtcccctactgccagcgcctataccaatcattaagttattacacaaacatcaacagcctacttaacaacaggtatcgtgctagtcattttaggattaatcatgattaaaacgtgtcgttttttaagttcaaaaacggccagctaaaaaccgctggaaacaggtgcgagtgggcgtaaacatgcttttcaagttcgtcctacgccgacttccaggcatttcggccaattgctagaacgcggtggacacagatttaagccgaagcccacgtcttaaatactggtcttccacgctttaatgccatattggtgaaacgtgttcgggtcagactgagacttgcggttagctacgctatgacgccaagcggaaattcaccgcttaacgccctagctaggctaatcctcagtctcaactcgtctgaacctcacactcttgcagtgctgagtattggccgaaacgccttccagtcgggacagtgttcgaatggcggacatgtgcggacccaacttttggtgaattcgtcattgtttttcataaacaataattttatcaatcaactgtcagggtgaaaatgatattaggatgtctcactattcctcaatcaacatcgtaataattggccgtctcgacaaagtggttaatacaaccctaacgtttcgtttaaagttcccgtatcaaaatagccaacaacagattgtgctaagttaagtggccgttcattagccattcgagcgggttcccgaaacgtgctcggtgccactgaatcctgtgcttgctacgccaacggactaatgccaaaaccgcattaatccgatggctaggcaatgctcggcttcaacccgtggcccctcacaggctgagactggaggggctgggtgacaatgctcagtagccaaattattcttagtcggaagtaattttcttccggcttagaataagactcgtatttgagatgacgcgggttatgcgttagctcaaatcgacgtcggctgcgttccagcaattgtcacccagccccggaggtcggaataggacgcacaccggctgacgaacaacaatctaaacttgacacgttttaatcatgattcatgaccgattaactaatacactgctaatgttgcacttgtcgtgtcaccacccgtggataatgaacaaagtgggcataaaagccaatcattaacacgacgaccgctaacccgcagacgccgttccaaccagctaaataccataagacgttgccacaaaatgaacctagggcgccacccatgaagtagccaaacatgaataccgaattgaaacggctactggcatggacatcgatactttgaatccgtgtctgattcgcgacctgcccgaattgagtacctaaatcaagaatgacgataccaataattaaccccaccaaatgcgtaccactcagccaaaacactacgtaggctaatgttgataacactagacccaagccgataatcgttcggggccgaaaacgatcggctaggcggccaattaaaggggctgctaacacaccggtaacacctagcaacgcaagcagaccagcttcacgacttccccacccgtattgatgctgcaagtaaaagacgagtgttgcccagaaaatattagaaacaccaaacaagacaaatccgttaacagccgacgctcgcaaaaccggatagcgttttactaactgaggtactgtctgaatcatggctttataattcgtggtatgtgtcgtcacgggatcatgcggtaattttcgccacaagacgagccacaatcctgcaatcaagatagcggcaatcagatagaccatctgccaagacaaatagctcgcaagtaccccactgacagttcgtgacaagagaacccccacgagcaagccactcaggacgttgcccaagacttgaccacgctgattacgaggtgcgagaaagccagcgtacggaataataacttgtggtgccacagaggttatcccaatcagtaaacttgccaaggcgtacacccaaatattgggagccacgaaggctagtaacgctgaaatgattgcgagtaccagtaagcgcataatcaacattcggcgattcatgatatcacccatgggtacaattaagagcaacccaaaggcatagcctaactgcgtcagcattgccaccgcgccaataacggcgtttgggagattaaactgttgcgcaatgtccgcctcaatcggttgaatataattaatattagccactacaatggccgcggagatcgccattaataggaccgtacttttatttaaagattttgaattcacgttaatttcctttccaattttgagatttaacagcttagtcaaaattagaaagcttgttcaaccctgatgatcaaccagtgttttaactgttgatcaacggggacactaccgcgcacgcctagttaacccactgcttaacagcggccaaatcagtaaccatatgggtcggccgttcagaactagtcggttgtcgctgatcacgattaatccaaatcatcggccactgcatagcactggctggaacaacatcggattcatagccacgtgcaatatgccaatgattatctgccgttaacttaaaacgctcttgaaccgtttcaaagaaagctaacgctggtttgtaagattgaatgtcttcagccgtaacaaccgctgtgaacgacacctttaaagcagcaatgttggccggcatgatatcccaggaagaattcgacataataatcaattgatagcccaattgctgccacgctgttaaggtcggtataacatcggcgtatggtaataggtgtcgttgcacttccaagcattcaacgtaatgactttcaaagaagtgtctctgttcaaacaatcgatctaaatgcttaagatcagcccggactaatgttgaataatctagataaggattgacactggcaggatcgtcctcataagtcgcgtaggctttgcgaaccgttagtgggtctaaaccaaccgccaatcctaaattagccacccattgatacagcggctcagtattaattaacgtcccgtaacaatcaaatgttaaatattttttggtcatattttttagcttccttactgaatgtcgatgaattgtgctggctatcattagcacgactcaccacaaattaactaatattatctattttattttaccacgacaccgaacactcggcagaccgccccagtaccaattaataggcctaggacttgcatcgtgatatacttattgattgtgcattattacagaatttataaaagaaaggacggtattatgccaactcaaaattcaacgttgccgcttgatgccaacggccagccctatcaccggacttggcttgtattgactttacttgtcgggacgttcactaccttcattacccaaacactattaacgacagcttttccaacgttaatggccgattttcatatttcagcaaccgccgttcagtggttgaccactggtttcatgttaatcatgggaatcatgattcccgtcagtgcctggttgctgacccgaatcaattccaagtatttgtacttaacagccatgcttatttttggtctgggaactacgctggcgtactttgccgtcaactttcagatgttgctgattgcccgaatgattcaagcaatgggcgtcggaatttccgccccagtgtttcaaacaatcatgtcttcagtttatccacccgaaaaacggggttccgcaatggggacagccggaattgttattggcttagcacccgccatcggaccgacactctctggctggattattgataactattcctggcgggcactcttcttattcatcctgccaatcaatattctagtcatcatcgtttcattcttcactttacggaaagtcttaccaacttccaaacaaccaattgattggtggtcagtcttgatctcaacaattggttttggcagtatgttatacggtttttcatccgttggtaatgctggttggggcgacccagtcgtcctcacaactttagtcattggtctgattttcattggtctattcgtctggcggcaacttcacatggatcagccattattggaattacgtgtctttaagattccggctttcaccctatccgcaatcctgaccgccctcgcttacatggctatgatgggcgtcgaaatgattttgccaatgtatattcaaacggtcctcggtcgttcagcaatggactctggattgattttattacctggcgcaatcatgatgggaattatgagccccattactggtcgcatctttgaccatatcggtgcccgcagactagcaatgacggggatgttactcctaacgcttggaactgctttcttcctatcaattagcgccacgaccccaatcttatggatcatcgttgtttacgccattcggatgtttggcctgaccatggttaccatgcccgtcacaacgaccgggatcaatgcgttacctttccggctgatttcccatgggaccgccgccaacaacaccctacgtcaagtcgcagcttcaatggggacggccgttttaatcagtgtctactccagcgtcgctaagtggcaaatgccgggacatcaattactgacacaggcacctttgaaataccgtcaggacggaatcaccgcaaccttaactggttatcacatggcgttcgttgtctcactcattttttgtgcgattggctttgggattaccttcttcttaaaaaccaatcattcaaaaaccattagtcaggaggatgatgccgcatgatcattgtcttactaattcttgcaacccttgtctttgctggcacgatgattttttcaccagcaggccgcaaccgtctcattgccattattattagtggcctgattattgccgctagcctcatcgccctcgtcctaaacgacaattaccattggggcatgcacgaagtcacccgcacgcaaattcaagatttagccccgctaaaatccaaacaagcggcgttgcgggtccagcaactcggaacggggtctgaacgcgtcatcagttaccgagttgcagccgccactaaagtcagtcacacggtgaccgcaaccaccacaacaactaaactgactagcggttcacccgcgcaggttcaactaaagaccacgacttggcagtttaaaaatcacctgacacacgtgttattcagcctaggaaataccaagacaaaaattgttcaacgccaatatttgtttacaattcctaagacgtggcaagtggtgacagttaaaaattagacgttaataaaactgactaaccatcttggctagtcagttttatttttgtttaatcgtcatcacttgtggcgcttcgccagccaatcaaccgctgaaacctgatacacattctcatcatgatcgccatccaataagtgctgaccacctggatgctgaatcaaaaagtcaaagcccgcccgttgcgccaccgcattgcttgcctgattgtccaccgccgcacgaatccgcaaacattgccgatgatactgattaaaacccaaatcacaaacgccacggacggctgccgtcatgacgccgcgtccctgaaatggtcgtcccaaccaatagccgatgttggcactgtggtcgttatcatcgaagtggtcacagctaaccattcccgcaacccgttgttcaacgacaatgactaggttgagcgcttgcgcttgttgtaactgagcttgtgcaaaagttaaaaagcgttgttcatccgccaccgtttgaattttagccacccatggcaaataatactgatactgcgcacgatcagcggttaataatgctagtaatgccggcgcatcgctttggggtagcggttctcgcaattcaatcgctggtgtgactcgataagttagcatgaacattcctactctcttagatgaaaaatcgcaatcatgattaattgaatgattaaccatgattgcgatttaagtgtctcaaaacccaattaatgttgcagtaataacgtaattaaaatcaaggcgctgacgacctgaatcgtccccacgcctaaaccatacagtgctaagcgcttgccagctttcataaagttaacaagattcaaacgtaacccgatagctgctaacgcaatgatttcaaaccaactactgattgtatgagccgttgcgccaataattgctggtaacgaaatcaagctattcaatgcacataagattaagaacccggccacgtaccatggtaaccaatgaccgttcccattaccactgacgacagcatcctcagccaattcattttcaatcgtgcgttggtgtaaccggccaaaaatcaaaacaacgacgactagcatcataatccgcataattttgaaaatcgttgcaaattgaaccgttgtttgattaatcatactagctgcggccactacctgcccaactgattgtaaagttcccccaatcaacgcccctttaagaatgacactgccaccaaacacggccattcctaagaccggtaacgttaacatcagcactgtccccatcaagttaactaaggtaatgacagtccccttatcatcttcatccgcgtcaataacgggggcgattgatgcaatcgccgacgacccacacacggcgttaccgccggccatcagcatacgtaccgactggctgaaacccagcttacgccctaaccacaaagccccaacgatcgtaatcgtcatttggcaaagaataaagagcacgccgaacccaccaattttgccgattgtctgtaccgtcatcgtcgcaccgagcaacatcacggaatattccaacagcttactttctgcgaacttagtcccccgaccaagttgcggttgtttcagaaacgtattgccaccaatgattcctaatagaatcgcgatagtagccgcacctaacgctggcacaaattgcgccaatccttgactaataattgcaatgaccagactggtcactaaccccggtaaaatccctttgaccttcattcgctttctcccatctctatctcgatgcttttaagtatacgaaagttatttacatttgagaaataaattattatgatagttactattaataaaaataatagttaggggtgaacacaatgtttaaacaattggaaacgttctgtgcggtatacgaaactcgcaacttctcccatgccgccgagcaactttttatttcccagccgaccgtctcaacacaaatcaaacaacttgaagccgatttacaaaccacgctcttaacacgtaacgggcgccaagaaatcgttcctactgccagtggtcagctcctctatcaacaggctcaaaagctgttaacaacttgggccgctaccaaaacagcggtacaatcaccacgccacttagtgaaagttccttgccggattggtgcctcacacacaaccgggcgtctgattctacccaccttattagccaatttgagtgccgtcagtgatcgctttgactttcaagtgacgcttgccaattcggccgaaattttgaccgctatgtcccaacacaaactggactttggtttagttgaaaagccactcgttactgaccagctcaatcgcttgccatttggtcacgatgagctcgtccatgcgggcgactttgccagtcccctctggctgctacgtgaacctaattccggtgtgcgtcattataccaacgcctttttaaaagcccgcaacattcagccagcacaagtcatggtcatccacagtaaccaaatcatcgcggacctcctcgctcatggtatcggccaaacaattatttcacgtcacgttttaagcaacgagattcccatcgaacagctaagtgcccattaccaacgccaattctttttactgactaacacgcaaccggcagcggcactgcgccccgtacagactgcaattacccagtacctaacaacgtggtcagattagcgatccccgccgttgttattaggtctttttgacattagcgtttaaaaaatggtctgaccactaaagtcagaccatttttgatattcactgaacaaccggctgccactgttgccaaacttgttcatcactatattgttcactactccgataggcccccttgctaagtcgttgctgacgttgcggactttcaagtgttcgagtcagcgctctgactagttggttgacggcaccatccgtgaccagataaccattcttgccatccttcaaaacatccttagggccatagttaatatcataagcaattgctggcacaccatgactaagggcttcaattaacgataatggctgcgcatcactttcaccagtataaacgtaagcaccggcctgatcataagccattgttaagttcggttgatacccagcaaaagtcacggcggtctctaggtgcaactgggacacttgctgttttagacggtcaagctcaccaccatacccgtaaatcactaaggtcgcatccgtaatcttatggtgcacttggtcaaaagctgtcactagctgatcgacgcgccgttccgcatccaaacggccggtataaataatttcatgcgcatgacgttcactgatcgaaattggtgcgtgttgagcttgctgtttggaaacaatggctgctgaaatcgtcaggattgggacactcggttgaccaccgagccactgcgtcaaatcttgcttctgttgttcggtactcgtaatcacaccgtcccaagcactcagaaactcgtgcaggccataaacatacgcgttattcaaattagaatagacttgatcacgcggatcgactgcatgtggcgtgggtaaccacaaatattttttagccgccgtctgcatgttcaccaccggccactgagcagctaacggccgatccgcaataaagacgttgttttcatcatattgcttgttcagttcatctaagaagaaccggtaccattcttgttcaccattaaagtagtagtcacggccatgataattgataagatggcacaacgaaacataattagtccaattattatcatgcgtataatactgttcggccatccgactaccatctggtcgatagaaaatatccgtgattggttccccggctgacgagaagaattcatcacgggccttaaagccccgttcatcataatcagtacgctgaacaagattattgaagtgatcaaaaatttcaatgaagtacacatgccccaccgtgctggggacaaagtggaccttagcaaccagccgatcaccagctcgcacctcactgacattggggtccggcttaatgtcataggcagttggccagttcaaatcagccatcttgatgacccgactggaaaagctggtcgtttcacgaaaaaagtcaaacaagttggccatctgatcatcggcaatattgaagcgccgcatattctgatgtaacaaaccatcaaattgacgcgttactagtttagccggtgcctgatgatctttaaacaactggagccgtttgaattcggcatgttccacaccagaatttaacgccattaaatattggttcacaaaaaaattcatcgctgtgttgccccctcaacttgataaaaatcggctgcggctttcatgagtggttgccactgttgccaaacagccgttgtgctaaagcgttgggcatcttgataagcctgttgactatacatggctaactttttcggctgcgttaacaagtcgatcatcgccgtagccaacgcattttcatcattgaccggcaccaattgaccatcgtgaccgtcccgaataatatcacgtggcccatatttgacatcataggcaatctggggcaccccatgggcctgaccttcaagcaaggcaagtgcaaaaccttctgcccgcgacgttaacatcgccaactgcgcatcattatagacagctgttaaatcggtcgtataatcattaaacgtaactgccgctttcagtcccagctgttccacaagttgatgcagttgtttgccggtatcaccatttgcatagccccagaaatcaagggtcgcattcggcacttgggccaatacctttttgaatgcccggatcacctgatcttgttgcttttcttcggctaaacgcgccacaaaaataatcttgcctgcggtgcgctgatcaaaagatggcttgggcgcattcaaagtcgcgtcatcgacaatcccaactggaatcgtataaacggcgggttgattgccaaagcgggcttgaaagtcagcagtttgttgcttagtcgacgcaatgacgccgttccattggtctaggttattgagcgcgtaagcataattaaagttgagactagccgtcttcggatgtgctggatcattaacgtgattactgtgtaaatgcatgactttaaacgctttagttcgcatgtgaagtgcggcgtaagccaactcatacgtccgatcaatgacaaagaccgcatgcggcgtcctccgattaagttcatcgaggaaaaaggttgtcattgccgtttcaccagcaaatgaccagtcttgcccctcataattaatgaatcgataaagtgaattttggacctgattttgtcgatctgccatatgaaatgtctgatagacaacctccccgtccggattaaagacttgttcacttgctacttgtccatcagcggcatagaactgttcaagccctttaaatccccgggtatcgtaccaatcggtcttcactaacttaccattttgatcataatattggacattgttcagttgtttttgagtgttcagaaatgtattgaccttcattaataattggtcattttgataaacttcataatgacgcccaacggattgcacccgcaagtccggtgctagatgcagatcttcaatcgtcatcttagtcgttggccgttcactggaatgctgaatgaaatcaaacagattaatttgattttcagccgcaatccctgctgctgtcagtgtctggtgtaacgataatgaaaaaaatcgcgtgaccatcttagcaggaacgtgatgctggttaaaaagtgccagccgtttcatctcagcatgttcaattcccgattttttcgggttaatgctggtattcacaaaataatacattattactcgctcccttacacgacgttctgcttaacggtctcgattataacaaattttactgaattaataagaatatcgctcacagctttaaaccattttttaagttaccttctgaattttaccgcgagtgtgatgataatgtggcgaaaacatgatgaaagtgttaacttgttacaccatgttactttattacaaaattggctcaaaccgtaatctgttatttattgctttgcaatctgcggtcggtatactaatcaccattcaatcgaaataacaacacaacttttataggagtgactgattaacttatgaaaattaaaaatgccctattaacttcattggcagctaccggtctgttagctttaggtactaccgttgctaatgccgataccgttgtcgttaaagctggcgatactgtcagtgaaattgctttaacgcataagacgaccatcaaagcgattcaaaaagccaaccatttaaagaacgttaacttgatctatatcggtgacaaactggaagtcaacggcaaacaccacgcaaccacggttactacccaagtaccaactagtgctgcttcaagaccagtactgccagttcaacggccaacagtactagcacccaaagtgccagcagcgcatccgttagcagcagtacaagtacgtcagcagctagcacggctaccagttcgtcaacgacaagtgtcgcctcaagtagtgctgccagctcatcaagcacaagtgctgcttcaagtagcgtgaccagcacgtcaaccgccagcgcggcctcaagtagtgccaccagttcatcaaccagcagtgccgccagttcgtcaactagcagtgccacttcaagctctgcaacgagccaagctagcacggcgtcaagttcaaccgccacttccgcatctatgacgaagttgagcaacaccactgcttccagtgccgccagcacaagtacggcagccagcagtagtgctaccacttcaagcagcaccacaacgagcactagcagcagttcatcaacaactagcacatcaagtagtgctgaagctgccgcaaaagcctggattgccaacaaggaatccggtggctcctataccgcatctaacgggaactattatggtaagtatcaactcagcaagtcacttctaaacggtgactactcagcttctaatcaggaaaccgtcgctgacgaatacgtggcttcacgctacggttcatgggtagcggccaaggccttctgggaagccaacggttattactaaacacattcatgcacaactgaacatacaatcagcgcggtcctatatgggggccgcgtttttctgttgccatataggtgcatcggacttgcctgactgcaaactggcaatccccccatgatcggcccttattgcagtccttcatcaaccactatgcaaatggtctgctggtaaagtcgaacacgtgcaagccgcagtcaatttgggagggcttttcaaaagtccaattctaccatgccccccaccgtcaacgtaatcacgttacgcaggtcactacattgacacactcgtcactaagattgcattgcaaattagcggtaatgtaagcgttaatctgttacactatgtcttaatcgggcatgttttattttctaaaaagtccgtcagtaagcaaattgcgcttaacgaaccgcttacatgatggtaaactttaagggaagtctaatctagtttgggagtgaatcaattatatgaaaattaaacacctattattatcctcattagcaacaactggtgccattgcccttggtgcaactgctgctaaggccgatacggtgacggtcaaggctggtgacactgtcagtgaaatcgcagacactcacaaaacaaccgttgccgccgttcaaaagttgaaccatttgaagaacgtcaacttaatctacgtcggggacaaactacaagttaacaaacaccagacagttaaaatgacacgggccaccacctcagtagccacgccaagcacgacgactacaacaactagtgccgccgttcaaaatcctactagcaccgttaccgccacgtcaacggttagtcaaagcacagcgagtcaagccagtgccagctcagttaccagtgcagccagtcaaagcagcacatcagccgttagccagagcagcacgagtcaaaacagcgccagctcagttaccagtgcaacgagccaaagcgcgacgtcggccgttagccaaagcagtactagtcaagctagtgctagttcagtcactagtacgacgagccagagtgcaacgtcggccactagccaaagtagtactagtcaagccagtgctagttcagtcactagcacgacgagccagagtgcaacgtcggccgctagccaaagcagtactagtcaagccagtgctagttcagtaaaaagtgcggctagtcaaagtacaacggtaaccagtcaaagcacgacgaccaccgctagttcagccgcaactagtagtgcaagtactagcagcacaactgccagtcaagctagctcaagcacggccagttcaacaacaagcacgacaaccagctcgactagtacatctgaggctgctgccaaggcctggattgctgctcgcgaatctggtggctcctacaccgtaaccaacggtatttactatggtaaatatcaacttggtcaatccctcttaaatggcgattattctgccgccaaccaagaagcgactgccgacgcatacgtcgctggccgttacggctcatggactgctgctaaagcgttctggcaagcaaacggctggtactaatcagcatctgcaattatcaaattcaagctttatcattgacatcaaagccagcgcggacgactcatcgttcgcactggcttttttcattaagatatagcagtgatgttctgatttaatcaggtcgtcacaccaccaattctgttatactaacgctatcctaattgagacggagggctcacacatgcacttaacattgacccaaacaaccattaaccagcaaacttactggctgggcacaacgcccaccggtttagcctttgtcggccgtgccaacggtccacgcgacgaatggcaagccttcttcaaatccgctaatattcattatgatcaacaagctaatcaacaggcctgtcaagaattacatgattacctaactggtcaacgccagcattttgacatacccctcgaccaaacgacgggcacccctttacaacaccaagtttggcaagctttaacccgtattccatacggtcaaactgcaacttattcacaactcgccacaatgatcaatcaccctaccgcagtccgagctgtcgccagcgccgttggtaaaaatccactccttattgtgatcccctgccatcgtatccgccgcaaagacggtcaacttggcggctatcgtggtggtttgccaatgaaacgcgccctattagctcttgaaaacgcccgcttgcccaaataagcttcatttagaaccaagctcacgcccttgtcacaccgaatcaactatgtcatcataaaatcaaacaatgattgctaattgtgccaatagttattaggcctaattaggattaaaacgtgccaagttgtgtaagttcaaaagcagccagcttaggcccgctggaaaaagttcgagttagcgtaaaattacttagttggcgcgtcctatgccgacttccaggcatttcggccaattgctggaacgcggtggacacagatttaagccgaagcccacgtcttaaatactggtcttccactaaccaagccaaagacgcttgctaagtggaatttcaccgctgagcattggccgaaatgccttccagtcgggacagtgttcgaatggcggacatgtgcggacccaacttttggtgaattcgtcattgtttttcataaatagtaatttctctcagcaactatcagactgaaaatgatattggaatagctcaacatcttaagccgctgtagtcaaaattgaatgttgcgacaaagtaggttatgcaccctgatgttttatttaaagttcccgtatcaaaatagccaacgacaaatttcaccaagttaagtagccgttcatcagccattcgagcgggttcccgactggaggggctgggtgacaatgctcagtagccaaattattcttagctggaagtgggttgcttccggcttagaataagactcgtatttgagatgacgcgggttgggcgttagctcaaatcgacgtcggctacgttccagcaattgtcacccagccccggaggtcggcatagaacgcacaccggctgacgaataacaatctaaacttggcacgttttgatcctatttcatgactaattagctcgcacaacacgtaatgactttatttcaagaatttgggggacaaactaatgctatccatcgcacatattcagaagcgtttcgggactgttcaagcattaaatgacgtatcatttgatgtccatgacggagaaatcatgggattgattggtcaaaatggcgcggggaaatcaaccacgtttcacagcatcttaaattttctatcattcgacggtcaaattacttggaatgggcaaccgttgaccgctgatgactacgatcaaatcggctatttacccgaagaacgtagcctaatgtccaaattaaccatcacacaacaaatcgtgtacttggcccgtttgaaaaatcagccggcacgggtgaccaagggcaaaattgccgcatggatgaagcgctttgcggtcaaggggcagccgaccgataagattgataagttatctaaagggaaccaacaaaaggtccagctgatttgtactttaattcatgatcccaaactgattatcttagacgaaccgttcagtggtttggacccggtcaacgccgacctactcaagcaagctattttagatgctaagcaacggggcgccgcgattattttttccagtcatgatatgagtaatgtcgaagcgatctgtgactcactcgttatgctacgtaatggtgaagcagtccttaagggtaccgttgaagatgttcgcgcccagtttggccggacccgtctcttcttgacgactgactggtcacaagcgcaactggccgatctaccaggagtcaccaccgttactcaacaaggtgcccgtcgattccgactcgaacttgcagatgcttcagttggcccagcgatttttgatcaagtcactgctggtcattacattgaagagttcagtcagcagccaccaacgctggatgagattttccgaactgaagcgggaggtgttaaccatgaataagacttggattgtgacttttgaaacctacttgcggcagatcaagtcctggagctttttgtcactcgtctttatgcccttcttgttcttcgggctcgtggccgccttttcttattttgctgcacccagcgctagtaagaatgacatcgcggtcgttagcactagcccacaattacgcacaagtttcattaagcagagtcatgtggctaccgctaataaataccaaacactcgccagcgctaaggcggcgacgaagcgcaatgacatcgccggctacctcgttttaacaaccaagaatcaacagttgcaagcgcagttcactggtcctaatgctgtcagcagcggtgacaaggctaagattcagcagttcttagccactgcccaaagccaacgtaacgtacagcgcgcacaactaagtgccaagcagacccaggcgttggctgtacagccaaaatttactgaacaattacagaagcacgctgcttcagataaaacagctaaaacggtctccttctatattgtcgtcttctttgtctacttgattttgaccacttattcagcaatcacagcccaagaaattgccgcagacaaaggcaccaagattatggaagtcatcttctcgagtacgacaccgcggaaatacttcaatggtaaaatttacggtgtcttactagtcattgtgactcagctgctcgtctacttagtgggtggctttgccgtcatgcaattcgttaaacgtagctcactcacaattgatttttggcaacagaataccgatctgatcaatcaagtaattcacaacttggtctcaatcaacttgttgtttgcattactggccgtactactctacaccgtagcgtcggccttctgtggtgctctggtgacccgggtcgcggatgctagcaaggcagcacaaccggtcatctatctgagtatgctagcgtttttcatggccctagcctttcagaacacacccaccaatctcttcgttaagattttctcatatattccgttcttctcatcatacttcatgccattacgcctcattaacggcatggcaacgatgcccgctgcaatcgtgtcactcctgattctcattgcaacaatcattggaagtatgatctacatcggccgaatctatggcgggctaatgttacaaacggatgaactcggtttctggggcaacttaaagcgcggcttacggttgaagtaggcccactagttgaatatttataacaacagcaagcacccggtctagcgcataatggcgttgctagaccgggtgcttgtattttttgaattcacattttcgacttatcggcaactagctcaaacaaccgttaacaacagctaaatcaagttaagcctgcttcgtcggataaatcgtaaattcattaacgttaacatcttctggttggtcaatggcaaagttgaccacgttcgcaacggctgctggactgattcccacttgttgataaaaatcagtcatattctgtttggccgtcttatccgtaatcgtgtgcagtaattccgtattgatggccgctggatataagctgaccgttcgaatattggtaccttcttgggcactttccatccgaatgacttccatcaaattacgaaccgcaaacttcgtagcaccgtacacgccggagccagcaaaggacttaatcccagccactgaagatgtcgtaataatctgaccagatttttgagcggtaaagattggcatgaccgctgccaccccgttcaagacgcctttgatgttaatatcaaccatctggtcccattcatccgtgtgcaaggcactgattggcgatgtcggcataatcccagcattattgaaaatcacgtcaagcccaccgaattgcgtttgcgctagcttaaccagtgcttgtacatcggccgacttcgttacatccgtcacctgataggccgcttgtccaccagctgccttgatttcatcaactaaagcagccaggcgttcttcacgccgtgcgcccaatacgactttagcaccattactggctaattgcttagcggtcgtcgccccaattccggacgaggcccccgtaatcacaacgactttgtttttaactgtcatctaactgttcctcctactcaccgtaaacttctttaatcagtgccattgctgaccacgccttaggccatcccgcatagaaagccaagtgggtaacgatttcaacggcttcatcctttgagataccatgatctttgcccatcttaaaatgcgcctttaattgtggaaaatcaccactggtcattaagcacgcaatggtaatcatgctccgatcatgtaaacttagtgcgctttcgcgtgcccagacttcaccaaataacacatcatcatttaatgcggcaaactgtggtgctaatttgcctaagttgtcgcgtcctgcggtttgtttaactgtcatattagtttcctccttcgataactactttaacttttataattttgcgtaggcttcatcatcaactggttcgagccattcgctagttcccttagtaatcgcgatgtgggcaaaccaactatcctttgttgcaccatgccaatgcttcacaccaggatgaattgtgaccacgtcgccgggatgcaataactgggctggtttaccagcctcttgataccaaccttcaccactcgttaccaataagatttggtatccgttatgatggatatgccaattattccgacagccaggttcaaacgtcacgttggaaacattcacgtcgacctgctcatcaccggctaaggcattcaggtaactttgaccgataaagtattgttggtaggcctcattctttacacctaatccaaataggccgctattattagttgttgtcatattaaaaacactccttaattatttgattgctaactgattgatgaatacagcttacaacttaaagtgcactttaagtcaacaataaagtttgaacttgctaaaataggatttcgtggtattgttattgctaaagttacttcaaataaaagttagaataaggagaattttaaaattggtaaggactactacagaacgttattcaatcggtgacttcgctaaagccgttggtctcagcgcccccacactacgctactacgaaaaagcgggcttgattgaaccacatcgcttagacaatggccggcgctattatgagactgccgatattaactgggtcaaattcttattgcatcttaaaggaacgggtatgagtattagcgaattgcaacaatacgttacctggcgcgcagccggcgacaacacgattccccagcgattagcactactcaaacacgttaaagaagactttctcgtccagttcaacgaagttcagcatcatctacagattctcaacgacaaaattaattggtatgaagaaaaggaagctggtattacccaggatcacgaagatttttcgagttacttgcaacggtttgggcatcacgaataactgaataacgtccgcatgcaatggcgtgcaaaacagtcacccagattgtttcaactttggtagaagaaacgatctgggtgactgtcttagtttgatattatttgcaagcctatttgcttctagaaattaattttgagtacgacgatgataaatgcaagtcaacacaccattttccgatgatgaggtcactaaccgcaacggtaacgctttttcatgtgtttcaaacaggcggatcccatcacctaagattatcggcataattgtcagataatattcatcgaccaaatcagcctcaatcaattgattaatgacattcgcaccaccacaaacccatattgacttgcctgcttggcgtttcagggttgcaatcaaatcggcggctgaactatcaacaaactcaatctgctcatcatttctgactaacttgcgacgtgtcaagacatggcttgttaagccgtgatacggccattgttcaggggcaagttcttcgactacttgttgataagtcttatattccatcctccccaaaataaccttttagtgtttaaattatatctttggatgagtacagctactgcgtcataaccatcaaataggattacgggccgtcttaatgaatgatggtagcagtctacattatgttgtataagacgtgttagattatgactcatatttaataactagtgccacgcggcgacacgtattatctggtaccaccgccactaccaaacgccgtcgtttcaaactcaaaaactgacgtctcagtacccatgacagatactgaagcgccagcttggcattcaaattaacataacctattaacgacctagtgttgccgcttgttgcgcaacaggccaagataccacttagaaattttaggttgcaacaacaacccaactacaatggcaagtccacagccgacatatcccatggtcgttgttctggtatatcccaaaccaattccaataataatcaaaaacgttgcgaagaattctcgaaaacttttcacaaacattggcatcacacctttcaatccagttaagtcacgaataataaatttatgtatacaaaagggaccgacagtctgctggtccccctcaattgcttactctccacgaatcattaagccagcaattccgtaatcattttttgataaatctcgatgaagcgcccatacatatccaaatcaacatattcattaacttggtgcgctgtaatattgccgggtccgaagacgatcacttgcatatcaggactctttacaatataagacgatgcgtccgtcccaccaggagcaccaaagtacgggagccgctgttgtaagacttgttccccaaccttcttcgccaactggaccaactggctatcttccggcgtatgcactgggtagaacgaacttgcgatgtccatcgttagattggcaccatccgcattgcattcagcaatgatggcttccaaatcattaatcaagcggtcattccgtaattctggaatcgtccgaatttttactgacatttcggcactggctgggacggtgttgacctgttcgccaccactaattaacgtcacgacaggtacggttgggcccaatacgggattaacgatagtcttgaaactgtcaaaataggcggtttgtttctgatagtaagtcatcaacatatcgatggcgttttgaccaatcgctggcatcgaactgtgggccgccaccccttgcgctttaatcgtataagtcagtgaacccttatgcgctaattcgatgaagtgttgttcggtcgtcggattcgcatccgccatccgttgcgccgtatcgtcgtcaacacctaacatggcttgaatcgacttggtcagtaaaagctgtttgtccgcaccgcttggttccgcacagatcaacgtttgaatatcatcggcgtaaccgagttccgtcaattgttcagcacctaaatggtcgacttcttctcccacagttgcgagtaaccgcaccgtgccatggagtgggacgtcttgatcgtgcaatgcaatcatcgcgaaaacttcagccattagtccagccttcatgtccgtcacaccgcgaccatacaaccgattatctttgatagttgctgccaacgggtccgtgtgccatttatctgcatcacccaacgccaccgtatcttcatgaccatccaacgctacgactggaccgtgaccatcaccaatttcggccaccaagttcacccgcccgggagcgtactcgattgattgtgcttcaataccatgttgctttaaaagtgtgaccaaataatccgccaccaattgctcatggttatttaccgtattcatttttacaatatcgcttaatgcctgtacagcagcttctaactgtgccgtttctgccatgccattcatcccctagtcatccttaattaaactgttccaatcaatttaattataccacttcggctaccgttggccgttgtcagacacgtttaatcgacagatttcagtgcatccagcatattgactcgctttaacttacgatgcatcattcccatgactaataaactaaaggccagggtcaataatgccgcgtaaacgtaactcaacggatgaatcgttggtgaaaacattaacgcgttcgtttcagccgtttgcaagatatatgcgtgcaaccagttgcccaagaaacaaccggcaataatgcctaaaaccgtcaatatcagattttcacggaaaatatacatcgtcacttcaccatcgtaaaagcccaacactttgattgtcgacaattcccggatccgttcagaaacattaatattcgttaagttatagagcactactagcgctagtgcccccgccgagatgacaaagatcaatacgactaagttcatgctatccagcattttaaaattagtggctttctctgtactcatcagtgtcacgttctgaacccccgcctgtttcaatagccgatccgcataagcattttcttgctttttcgttgcctgcttaaaccggacatagttcgtgttatatactggtgcctgcttgaagacacgtcgataataagtcggactcatatagataaagtgattgacgtaattttcagccaccgcactgatgtgaatccgcttggtggtttgcccggccaacttgattgttaaatcatcgcccgcatgaacgccatataacttagctaatttttcatcgatgaccgcatcgcgattaccgatatgaatggcctgatgactttgtcggtgccgtaataccacgaacttgcttagcgattggtggggtgctgggataccgagcgtagccgtctgttctgctaccccggactgtttgaccgtcacctgcttggcctgtaatttcaaactagcctggtaaagttgaccacgactaagtgcttgccgttgttggtccgtttcgttcccactacgcgtcaccactgcatcgtagtgccacaattcgttaaattgcttgacgctaatatcaccaatggaatcctttaagccaaaccccgtaatcatcattgccatgcagcccgcaataccgagcacggtcatcagcaaccgttgcttataccgaaatagattacgaagtgtgattttatgattaaaactcagccgatgccatagccattgccagcgttctaatagcaaagtcttaccggccttaggtgctcgtggctgtaagagttgcgcgggtaaactgtttaaatccacgcggagcacgaccagtgccgtccccaacgtgcacaacaacgcaatggctaaggcgataccaatgtccatccaaatgtattgaacgttgattgcgggcaaattatacatactaccataggcctgcgcgataaaccgcgggaaaaaattgacgccgaacaggacacctagcgcggtcccaatcagcgcggctaaaccaccataaatcataaactcgctaccgaccgcggtattcgtatacccgagggcctttaacgtccccatctgtagccgcaattcttcaaccatccgcgtcatcgtcgttagacaaattaacgcggcaatcgcaataaagaacagcggaaagacagtcgacagtgccacgactcgttgcgtattttcgtgatattctgtgtaacccggattatccgtacggtcagtgtacaaataagtcggcattgtgatggccgcgacctgggcctgcgcgcattttaattggctttgtaacttgactagttgtgccgttcccgctggcacttgactagcaagttgctgggtcgcctgccgcaatggtttcagcttagcctgggcctgggcttgggcttgtaatgcctgctgccgcttacgcgcttgtggttttaaccagcgtttgagttgcgcggtgttctcgcgattcaagcgccgatacttcgccgtgtagggggtgacgccccgcaaatttttgaattgcacgtcaatgcgcgttatcacactggacttaatcacctgcggacggacatagaccaagtagtccaaagtccctttgccaatgttggtgacaccacgattcgtattttcaacatacgttggtgaattgacaaaccccacgaccttgaatgttcgccgcgtgaactgtgcattgcgcttagccgtactgctaattcgatacgttgaaccgacttttagcttcggctgcaatcgctgtgcttgcgcgtctaacacgatctcattggcatgccgcggtaaccgtcccttaacgatccgtagccgattcagtcgttgggttgtcggtaacgccatcacccgcacgacttgactattgttcaactgattaacatcagcgtagcgtgtcacttggtaagtgagctgtgagcggtgttgattcagtactcgtgtatcggccttagtcagccccattgtcgactggacactattggtcgccagcttttgcttcgcataataatcattagctgcctgtgacatatccggaccagtcgcccgaattcccgtataaaaagcaacccctaagaaaatgatcagtaatattgaagcaaaacgggctttcgacgaccaaatctcacgcataattgttttaaaataagctgctgtcatcgctgcacctaccattcaatctcagccaaaggcgttggatgagcattatgctcaaccgactgcacttgagcatcattgatacggatgacttggtcacccagctgcgcaatcgcactattatgcgtcacaatgatgaccgttgtttgcgtctgcttagccgcatcttgaatcacctgtaagacttgcttccccgtctgatagtcgagcgcgccagtgggttcatcacagagtaataatttgggattcttcgcaactgcccgcgcaattgcgacccgctgttgttcaccaccggacaactgggctggaaagttatctgcccggtgcgtcagtcctaccaaggccaacgtctcatcaacgtcgcgtgcgtccttggtgatttgcgacgccaactcgacgttttcacgcgccgtcaagttcggaaccaggttgtagaattgaaaaacgaacccgaccgcttgccgacgataggtcgttaattgccgtgagttaaattgcgcaatgtccacaccatccaccagcacacggccgctcgtagggctgtccatgccacctaaaatattgagtaacgtggacttacccgcaccactcggacctaaaattacaacgaccgcaccctggtcaacttcaaatgaaatatcacgattagcaacggtgacctgctcaccatttttaaactggcgcgttgcctgctgcacttcgatgtatgccataatttagcctcctatatgtaatcggttactattatcataccgtattttcaagattcacggttagcatttaagccaccgcttgcattttgcctcgcattgcccgtacaatgacaacagtcactgacactgataattccagtgttatcacccgttatccgaggaggtccaactatgattgcccaagccattgcgactgttttaatgctaattgtttttatgttcggttttacttactttctgaatagcctatttttcagacgcatcgaaaaacacgaccgtgaacaaactaaaaaacgcgaacatcaagaccaccactcgtcttaatgctcgcgtcagtacgtattatgttaaaaataggactgccagttaagatcaagggcagccaacttcggcctgtcggaaaagaggttgtttagcgtaacctggctttgattacacgtctagcaagacttacaggcagttctaccaatggctaaaatatgctcgctgtcgccccacgctactagatcaacgcttcattttcctcattcaacttgtcacagtcaatgatcaattgacaaacttctttgtctggcgtcaacttcatcgaatacttccgcccatattcaatcatcgtgtgatgggcttgatgtaattctgccggtgccaacacactcacgattttttgttcaacttgtaacggcgtcgcggtctgagcgacaaagtgcaagcgtttcgagattgccgagacgtgtgtatcgacagcaaacgtcggttgttcaaaaacgtcactcaataccacgttggcagttttgcggcccgcacctggtaacgccatgatgcctttacgatcggtaggcacgacatcggctaattcttcatggacaatgcgcgccgttttaatgatgttgcgagccttattatgaaataatccgacgctcttgataattgcttcaacatccgcaacatcggcagccatcaagtcctttggttctggatacttctcaaacagtaccggcgtcaccttgttaaccgagacgtcggtcgcctgagcgctcagaattactgaaatcaaatactgaaacggcgtccgcgagtccagggaaggtcccactggtccgatgtctgcttccatttggtgaattgcccacacgatctgatcatcttttaacattgcgcttaccgcctctttcttatcctgtttctaagttaattttaaggctgagggggtgcaatgtctattattaaaaatatcgcggccttatttctaatccaaacttcaatgacatgaacacagtatcattaatttctatcaatcatcatcacaatcagcaaaataggcggcccgttgccgagcccaatattcatggtcggcggtggtgatttctcgtaagacatggcaaggattgccgaccgcaaccacgttatccgggatatcatgagtaaccacggaaccagacccaatcacgacgttactcccaatcgtgacacccggattaacgaccacgttgcccccaaaccaaacatcgtgtccaatcgtaattggccaaccatattcgagttgttcagcacgaatggcggcgtcaatggggtgacccgccgtatataagccgacccgcggccccataaagacgttgtccccaatcgtaatccggcccacatcaataaaaatcgcatcgtaattggcgtaaaagtgcttgccaattgtcgtgttacttccatagtcggtatgaaatggcggttcgatatagcccccgtcaccaattttgttgaacattgccgttaacaatcgttgccgtttttctggttgggcttcggttgtttgattaaattcccgtactaaccgtttgacacgatgattttcacgtcctaattctggatcatcagcaacgtacaactcacccgccagcattcgttctttctgtgttttcatactcccagttcctcccatcaatcgcatttcactttcaccagcatagcacgcaattatcaccatgaacacgcattctcgaaagcaaccgctcccattttgagtatcgttgaacttttaagcttttttatactgcgaaaaaatcattatcgtttataataagaggtatacacacaattaagggagttttaaccattgaaaacatttaaaagcattatgagctgggtggtcccgattgcgattggcttgatcatcgccctactgattcgtcaattctggtttactatggtcaaagtcgatgggacttcgatgcaaccgaatttacaaaataacgaacgcgtcgtagcttttaagactagcaaaatcaaagcaggttccgtcgtcgtcttcaacgcctacggactcgatccgaaccagaccgacaaaaacgccgtttatgttaagcgggtcattgggatgcctggggatacggtccgctacacaagttccggtaaactttacgtgaacaacaaattagtcaagcaaacctatctcaaaaataagtatcaacaaacgactgggtccttcatggctaatagtcacagcaagttcactggttggacactcaatagtttgagccatgatcaaggctgggccaagtccgtgaccaacaatacggtgccgaagggttactactttgtccttggtgatcaccgaagcgtttctaacgatggccgttactgggggctcgttcctaagagcaagatgattggggtcgtcaaagcatggccatggcagaaccgcaaacaatatattaataactaccaaccttaagatttgaacaccttatcagcaagtcgttaactgcgacttgcttttttgttatactgaaaatattatttaaataataaggagcctaatcaatgaccaccaaagtaaaagttgtccttagttggctactccccatcataattggtctgattatcgcacttttgattcgccaattctggttcacagtagtaaaagtggatggtgattccatgcaaccaaacttgcaaaacaatcaacacgtggtcgccgtcaaaactagtaccatcaaacgtggtagtgtcatcgtcttccacgcatacggcgtcgataccgcccaagctgaccacaacgccgtttacgtcaagcgagtcgtagcagttggtggcgataaagtccgttatacacatgctggtaaactatacgtcaacaataagctagtcaagcaaacttatcagcctaatcactatcaactcacaactgggtcctatatggccaacgcccacagccaatttaccggctggacattaaccagtttgagccataatcagccggcttggcaggtcactgttaccaacaaccggatccctaaaggcagttactttgtccttggtgatcaccggagcgtctctaatgatagccgtaattggggatttgtctcccaaaacaaagtcattggcgttgttaaggcttggccgtggcagaatcggcaacaatacatcaatcattttcaaaactaacaaataaacgaatcaacaaagttatgaacaacttgttgattcgtttatttgttaaccagacttttatccacagttaataacttaatgccgttatccacagtatctgcataagtcttcaattgatttgatcagttttctgaacggattatcagctccgactatttttggcgctgacgccaatcctggaccccaaaatacccacaaataatcgggcttaaaggaaccaaaatcactgccatcaaaatattcttaaagaagttgataaagccatccatgaagtcactcttagcctcgacttgcggcgttaatgcggttggaacaggtttgggctttgtccgcttggctgctactgaccatggtcggccagagtcctgaatgatttgctcatcgtctggtcgcgttgacagtgtttccttgggttgtttacgccagacttgaaacacccgcggccaacgatacttcacaattggaaacagcacgagcgcacaaataatactgtaaatgacgaacggattaaattctaacacgatccgattgacttcctgacgggccgtaaaaaacatgataatgaagacggcgattgcaccgtaaaaccaactaattagtaaatgactcgttttccacacgttgtgccacctccccggttgttgacatactcaatcgcaccatacttttacactgcaagccagcttcatagatcgggtctggatagttatccacaaaaaagttgacccacacttcaatcatctcaaaaccagcgtgttgataaatcgctagttgccgcaacgatgaattaccagtgccaatttgcagttcatcacaggttggcgctgcttggcagactgcaattgccgttgctagtaaggccttagcaatgccgcgatgttgataggcgggcgccaccgcaatatttttaacttcccacacccctgttttgaacgttgtcaacacgacaacacccaccacttgtccatcttgttgataaccataacattggcctgtcgataagtacgctgtgacctgtgcccaagatggatcagctaataacagtaaatcccgtggaatttgagctgccgctatcggttggattttcatgactgtcgcctctgatgccgttgatagccgttaccccaacaaacataaggaatgatgaccgcaataattgctaaagcatactcgcgcaccgttaagttcatggcattgaccacgacaaggtacgccaaaaaagccgtccataaaaccggaacgataccgccgacccaaaagtagcgactggccgtaaacaggtactcttctaagataaagataacaattgcaataacacctaaaattagtaattgcataatgccacttcctaacttgtgattaacgcagtgcctactgcttgtttaactgttgtagcatatccacaaaacgtccgattgttaagttagccacatcttcatcagaatagaagatgatcatttgggaccgttgttctggggataagttcgcttgggagccaaaataaactaggtaaacgtccgcgctgtggtccgtcaaactctgaccataatctgtatctaacgtgaagttgaaatctgcacccaattgtttttccatggcggccatgaaagcttgcacatccgcagttgcgaccgtctcttggccggccaccgtactcgtaataacattaacttgcattttaaaagctcctcgttaaaatttttaaactcaattttcacagtagcgcacttttgtataaaccgcaagccactagttgtccacagtggataacttattccgtgaccggtacagtcaacttatccccagtgtaaaccatcgttgtcaccacacttggtgccaattcttgtctcgttgccgcacgaccagttgcgacgtaatgcatcattcgcaacgttgcgccgtccacaatcaacaagacctgaccatgatcaggcgttgccgccataacctgttgtaaccccttttgatagcgatcccagaactcctgcccactttccgccaatccatccgcatcgtgatcgtgcaacaatgtctgtagctcactgggggtctgatctgcggcaaaagcggccacactctgataacctagcttagtcgcaaatcctgaccaaaccgccgcgcgttcagtgccttcaaagccgccatagaatggcgcacgtaacgcgactaccgttcgcaacttaacgggttgtgctcgtgagtctaagataatgcgcgcagtctgaatcgcccgactcgtatcactagcgaaggcggtatcaaacgttgtcgacgccaactgctgcgcaaccttggccgtcgcctgttcgccagtcgccgtcaacggcgtgccgctccaaccctggaaccggtcaagttgattaaagtacgttgctccagcaacgactaagtgtaaggtgattgatttcatggttaattctccgttagtttttttagattattcaactattttagcataaaaacttggccggacaaacggactctaggacttgtttaatatgaatttgagtagaattgtaaccaagaatgaaacaactctcattttaaaacatacagctggcaaacaaaaaatcaggataagaatcagatgtgcatccttatcctgactttaattattgtgcggcaacagctcgttcattttggctaaccgagaattagcgaaaaatcgccatgccaaatactcatcaagtcacgacacgtcttttgatggtaagcttaacaccatcattgtgtatttctcttcattagtagcattaaatgtataatatcgaacattgttatatgccacagtcatcagaaattaaaggtattatagttcgcttaatatattctattcagaaattgtcacaaagcacgggcgtgttgcctttagttgacagtctagccaagccaacaaatactattttcctaatgcgaccgttttactgaccactaatcactagtcgctttagtaggtactggctttctgcgcactaatgacccaatcaccattcttcttctcataaaacatctgcatctgcaaccgccaagtatgcgtaccaccaccccaaattcttgcttgaacttggttctgaccaattaagcttgcccggttaccttcaatctgaatagctttgatggtatcttcttttgaagcaaaatattgcatttcttcattttgaatttggtcaatccactccaatttagactgcacataccccgtcatgtgggttaacttcatagttggtgccaaaatttcatttaaccgactgaggtttttctgaaccatagcaatattttcatcacgatacaatttaataatcatttctttatccgtcattcttaccacgctttctttacttacatcaagcatgataccaacttttctatgccaaaaccattcagaaatcaagggtcattcataagtaaaaattatgcaaaggtttgtttcaataattcagcaaaagtttcgatataataacctgaattattagcttgccaataagcgtaatagttctgaaccaattttcggtttcctttaaccaaggaaatcattttaacaatatctttatctaattgtgttctcatccgctgattgatgatcaaatacccctgattagacgcgatcaacatttgtgcctcgtcatagcttttagcaatcacaaactcacttttgacacctaaaacattgcgataatactcctcttctgagacttgctgattgccatcaataatcaaaatacaaggaatatccactaagtcggcaacatcgattttttgtgtctcaactggcaacgaattgttaacggcaaccataaactcactagcagtcaaaaattcattttgatattcattggataaggcccgccgttgatcagaaaaattcaaatcaatttttcctgtctgtaataattcatagagttcttcgtgcgtgccactactaattttgattttcactttaggaaactcctgagtaaacttcgaaacagtttgtaaaaactcagcagtcccaaaacttcttaaatagccaacccgcaactcgacctcatcattcttttcaattttgatggttttctttataagttggtccacatccgccaaaatatcctgactatgaatataaaagtactgacccgcttcagtaacttcaaagctgcgtcctttccgattcaataacttcacaccaagttgactttccaactccttcatttgctgagaaatcgctgactgcgaaatgtggcagtccacggccgcttgagtaaaactatgattattaacgattgcgataaaatactgcatctgttgaaacattaccggcacctcaacctttacaaaattatctttgaatgttcaaatttgtcatattattttaattagtataaccttaatcaacaatttgagaaatgttttgcagcagaacctgaaccgattccctgccatgcttataaacgaaaaaagtcactagctatctagctaatgaccttttgaatattattttgcatttagtccaacactatcatgtgcataataatcattatcgacaatcgcattcttgacaaaatccgcaattgaattgattgagacatcatgcccaccaaatggttcgccttttttcgtgatttcataatcaacaggaccaccagtaaaccagcccggacgaatcagggtgtagttcaaatcagaagcttcaacaacatcggcggcttcccgataagtgcgtagcactggattactacttaaatttccactagcaccaaccgaagcgggaatttcatcataaatacccattgaagtaataaacagcaatcgtgaaaccttattccggtccattgccgcaacaattttttgggcaaagcgacctaaagaaccactcaaggcaacaaaaacaacgtcttgtcctgcaatcgccttgtctaagtcactatctttagtaacatcgccagcgataacactttcacgctcactagtctttaatcgattggcacttctagcaaacaacgttaactgattatcggtttcattcaaaagcgtttgtcgaactgcaccgccaatagtccccgttgcaccaacaattaaaactttcttcatgtttccctcctatttatcactgacaatgaccaatgacttaatcgcattccgttggtccattgcttcgtacgcagcttgaatatcatctaacataaaccgtttcgtaaagacttggccgggctgaattttccccgtcaaaacagcatctaacaaaacttgcttgtcatccgtcgttacagcagcaatcccaccacgtaagccaatgttcttccaaaaaagattattagtattcatttcagccttttgtgggaccccaacgcgaccaacaaccgcaccaggacggccgactttaactgctgtgtcaacggattgttcagtacctacacattcaagtaccgcgtcagccccagtttcggtcaaagccatcactttggcaactgcttcatcaccacgttcagcgataatgtccgtggcgccaaatgcttttgctaacttttgccgatcttcatggcgactcattgcgatgatccgcttagcgccaagcaattttgcggaaagcaccccgctcaaaccaacggcaccatcacccatcacaacaacggtatcatcttttttgacttctgcgctagttgcggcgtggaaacccgttgccatcacgtcagctaaggctaaaaagttgttcagcatgtcgtcagaataatcttcgggttgtccaggaatcttaattaacgcccagtttgcattggtaaagcgtaagtattcaccttgatagccaccgttaccgccggcttcttggtttaagcaatccccatcaaaaccggctaaacaagcggcacagtgcccacaaccatgggtgaacggtgcaatcacgaaatcgcctgcttgtacatctttaacggctgaaccaacagattcaacaattccaattgcttcatgaccaacggttgaacctgcttggcgttgtgaaatcccgcggaaccaccacaaatccgacccacatacacaggcccggagcacccgaataattgcatcggttggcttttgaatagttggtttgtcgtattctttaacttcgacttttcctggttcaataaaagttgctgctttcataataaactctccttaaaattctatttctggacgccattgttacgaacttctgaaacattaccataccaatattgtgcggtaattccgccatcaaccaagaaatcactccctgtgataaaggcaccacggcgatccattaagagttccgccaaattggcaatttcatcaggtgttcctggacgtttcgtaaccattgactcgaacatctttttgtatcccgcaccacgaggcccgttcaattcgtcaacggctaatggtgtcatgataataccgggactgatcgtgttgatccgtgcactgcgagcttgccacttaaccgattcagcagcgacccgtaaaacattggttcttttcgcatattgataagccgctaatgaatccttgatcacatccggttgtaaaattggtaaatccaataattcttcagtcggtgtcatggctagggcttgattatctgcttgtgataaggcgggtaatcggtgtcccgattgcgacgaaattacgattcccgcactaccgggagccatgacttgaccaaattcttctaacaatacggcagtcccgtaaaggtccactttgagcacttgttctgggctcgcttgggatggtgaaacgccagccgcgttgaccaatcccataatcttaccaagcgattgtgccttagaaaccactgtcttaatagattcccgtgatgaaagatccgcttggatggtctcaacgttaaatccagcttccgtcaagtgttgtttcatttcaactaattttgcttcattatagtctgccaacaataaatttctaccggcagcaacacgtcgaacaattgctttaccaattgagccggcaccgaaaagcacaattacttcgttattcatattcattgacctctttacttgttttgattcaccttaacttacaagtcatatcttacaagcaaacgtcttttagaccaatttcaaattcagcccacattgataagttttacttatcaatgaaaacacccgtcactcaaaaacaagggacgggtgttttggtttaatgttttctaaactgtagtcaattatcggtcaatgtattaatcattacacttccaaacggcgacctgccatccacttgatcattttaggatcagcatgtgagaagaactggctttcgccatcattaagagtcgcaatttgtgctttgtcgtcatcggttaattcaaaatcaaagacgtccaaattttgacgcatccgttctggtttaaccgacttagctaagacaacaatatcttgttcaatcagccagcgtagaataacttgcgcaacggatttaccatatttgtccccaatcttagttaataccggattgttgaaaatatcattcttaccttctgcgaatggggcccaagcttccaaggaaatgccttcatcacgtaaagcttgaatattattcgtctgttgttggaacggattgatttcgatttgattaatttgtggtgtaacgtcattaaattcagccaagttcaccgcctgttcaacactaaagttagaaataccgattgcacgaactttaccctgtttttgtaattcttccaatgcacgccaagccccaaaggtatcgttgtatggttgatgcaacagtaataaatccacgtactttaagcctaaccgatcaagtgaacgttgaaacgagctcatgacacctttataactagtattttcaacccaaatcttagtcgtcacaaacaattccttgcggtcaacacccgaggttgcaataccacgacccacggccccttcattttcataactttgtgccgtatcaatatgccgataaccggcttgaatcgcatcacgcaccgcatcttcagcttcttcaggatcagtaatttggaatgtcccaaatcctaatatcggtacttcaacaccattgtttaacttaattgttttcattaatagcgccccttagtttaatttaacttggcgattagtcgtcatgctaatgctcagcaccaaacccgcaataaaaatggaatagatcatcgcttgtggataaatagtgattgctaaaattagcccaatcaatttaattcctagatcgagcaatacgacccacgttggcgtcttatataacaatccaaatttggcgcgtggattgagacgacctagattcagcgatagaccaacgttcaataacgaaatcgcaataataataatcccataaagcgcttgggcagtcgcattatcaaaactgttcgcaaccaggctcgttgtgtatgggaataacgatgcgaaaaacaacaacactagcgttaagagcacggttgtcatattaattgtccgaactgcttgccaactattatgatgtgacatccacattaatccaatccagaaaaacgacagcgcataggcgaaaaagctcgcatgcaatgcccataatccggtccaactaacgggatttggtttactcaagtcaagaaccaaaattgtcataataatagctagaatcgcatcttcaaatgcggtcagtcgttcattattcattaaaagatcctccaatttattaattaacttaattataattcagcattacattaagctaactaaaagtgacttaccaagtcacgccaatgactgtcagtcacgttgcgtaacacggtgtatccattgattgatctgtttaacttcacgatcaactttattaccgtcaatgactagagctgtctcatatcggttagtactcgaaccgtcgacttttaacatgcctttgagacgttccacgctatccccctgaccataaccaccctctgtcataaacggtgcaatctgcttatgctgaagttgactaccatactggattaaaaaagcagtcatcggatgcgataaagtcatcgcccatacaggataacccagatagatagtttgatactggctcaaatcaggaacctgcatattcaattccggataattagcagtttcgcgctccgaattagcacgcgctaacgtttgctgataattacggtcataaggtgatttgaccacaatctccaaaatatcagcctgagtctctttagcaatttggctagcaagcaattcagtgcttccggaccgtgaaaaataaataatgatgcttcgagcctgctttgttaatcgtctagtaggctgattgctagcattcgtatccattccatcagatttagttcccgcaccatgttgccagacactggccgttttccctaactgataagccactactggctgatcactgatttgattgtccattactgctgatgctaacttaacgtccatacgttctttaagcgccattaactacttacctccaattaaatcaaagtactgccgatgtaacgtcaccattactacttattcactagtgataattatccttgaccatccttaaatgcaggataaagtgtcataccgccatcaataaataaagtaattcccgtgacataacttgattcgctggaggccagccaagcagctccggctgcaacctcttctggcgtcccgattcggttcattggcaccatgttaacggtctggtcatactgctgtggatcggcaaacttttcagcattaattggtgtgttgattgcaccagggccgattgcattcacacgaatattgtcctgcgcatattccatagcaatcgtctgagtaaagagtttgacactccccttagcagctgcatagctcgcaaaagttggccaaggaatccgttcgtgtacggatgacatgttgataatattgcctggcttttgatgcgctttaaagtacgcaagggctgtccgtgaaccaaggaacacaccggtctgatcaatagccgtcaccttattccaatcatccaatgagacttcatgagttggtgacttaatttccataccagcattgttaacccaaacatctaggtcaccgaaatggtcaatggccgcagctaataatgcatccacaccagcttcgctcgcaatattagcttggacaataacagcgtcaccaccagctacttttacagtatcagctgctttttgcgcaccggcgggatcactattataattaatgaccactttcattttttcttcaccaaatcttttggcgattgccgaaccaattcctttagagccacctgtaatgactgctaccttaccatttaaatcttcatacatttttacttcactcctttaacaataactatttgtttacgaagcgccgctatttatcgctccgattgaatgtctatatattaatgctaaaaagacactttgaaaattacttgataaacatgctagcattcgtttaacgtatggcataactgtgtgacctttagctcggtcagtgacacacgccaacattgctacaccagtgatatatcactgatgattagtcgtttctaagaacctgtttaaaatctagctaatttggtatgatagttcaaaaaaggtgatcagtaatgaattatcccagtaatatttctcgccgacaatttgaactagtccgtcccattttagaaggtgcacgacagtcaaccagaccacggaaatatgatctttacgacttattttgcgcggtggcctatgttttaaaaaccggctgtcagtggcggcagttaccagttgattttcctcgttggcaatcggtttattattattatcgagtatggtctgaagaacaagtccttgatgaaccttctattttggatcaatgcttaaaaaaattgtctttaccctacgggaaaaacagtcacgctcggctaaaacatcttttataataattgacgcccaaagtgttaaaaatactgataccgccaagcatcatggttacgacggtggtaaacgaatatctggaataaaacgtcacttagctgttgatattaacggtttgccacaagcaatccatatcactactgccaatgtttctgaccgtgatggggctagtgccatgctagcgctaaactgtgaacatttacaacaagttaaatcagttcttgttgatggtgggtacaccggggacaacttcgccgccactgttcaatccaatttaaaagccaccgtacaggtggctaaacgcaatgagctacataaatttgaagtgttaccacaacgctggattattgagcgttctttcagttggttagataaatgtcgtcggctctggaaaaattgtgagcggcaccttaattcaagtcgccaaatgatcattctcgctttcttgatattactcttaaaaagattttaaacagattctaaacacaggtacaactccacaatcattcctaaaagtataacttgctcattcaacatactaacttgaagtcaatcaatgccactagcacgactaaccaaaatcagcggtacttaagaataaaggtattcttgaacaccgctgattactgatcagacatcataatactaacgggactaaaattgcattagcgccgctcattttatggctaatttttcattagttcgtcttttgtaaagaaaccagctcaattattccgtcgcaagttgatcatatgacgtttcagtttaaattaaagtagtgacgactgcaccgatcacaatcaagactaagccactcaaagttaaaactaattcacgtttggatttacgctcgtgtaaaaataccatgccacctaatgttgacaacacaacggataactgcgaaaccacaaaggccgtattgaccccattctggctaactgaaacaatgtatgtcaacgaagctactgaaaaaactaacccaccaataatgttcaaccaactagcccgttctgccacaattcgaccttgaccacttactaacatataaacaataacggctaccatcattcccactgattctggtaaaaagatcgcaataccagacgcagataacgcctttggaatcgcattaaagacaataaatccaatggtcgtcacaatcaacatcacaatcgttcgtcgctgattactgccagtcacttcttggcgatcttgaattgaagtcatgatgacaccaatcacaagtaacaagacccctaagccgcccacaagttttgcaattgtcgttgaccattcaccaaacaagaaaacaccaactaacgatgtcccaactaactgtaatccagttgaaatcggcatcgtcttagaaacacctacattggcgtatcccgtatattgtcccaactgaccaataatccaaaaggcaccagcaatcatggccataataaatgaaatcacgttaatggctgggtgaacgattagctgaacgactaaactagcaattaatgttccaacggccgtaccaaaaatttgattaactggtcgcccgcctaattggctcacaattagtggtaacacgccccacgcaatcgcaggtaataacatccaaacaatattcattatgctttccttcattcctttaaaattttgtggtgcgcactgattgcaagcaatgttcaccaattaattaataaaaacttggttttgaaaattcagtctgcggttctcctaagcctaggctttcacgatgatagtcacctttaccagccaacaaattaacgacgaattgtgccacagcttgccgcgtcacttgggccgaagtaaatggttcacccttcttagttaccgcaactgccgtattaccagtttggttatacagccacgtaatccgtaacaacacatagtcgaggtcacttgcttcaatcaaatcagctgcctgtttacggtctgactgccaaacgataccggtatgttcacgataccattgctgaaacgggccactgacttcttgataaagatctggaatactggcaacaatgagtcgtttaacccccgtcgcatccaaaaccttaatcaaaccggcaataatatccgggccagcaacaaagctcagatagaccgcgtctactccgtttaatgcggtttgaaccttatcaaattcaagaaaatctccgtccacaaatgtcactcgtatcgaatcaaacgctgtcaatcgttgtgatacattatgtccatacaataccaactgatcatcggtttgcgccaacagctgctgtgtgaccatttgaccaatttggcccgctgcacctaaaatcatcactttcattaataattcctccgttcaattcaaaataaactttatcaatttgtttcttaacaactatcctgctaaacgatactaatcaagccctgatggcatgcgactcttctgaatactggtgccaaaaatctgatcaattgttaacggatcatgatgatcaaagaactgactacgatgttgatcaagttgggtaatccgttgcatatcttcgtcagtaagttcaaaatcacaaacatttagattcgcaaccatccgttccacatgaatcgtcttggaaattaccacaatatcacgttgtaataaccaacgtaaaataacctgactagcagtcttgccatatcgttgaccaatggcgactaatactgaattttcaaaaatcgcttgtttaccttccgcaaatggtgcccacgtttcaacttgaataccttcagactgtgcaaaatcaatggcttcttgttgttgataccatggattgacttcaatctggttgaccaccggtttgattgtcgtcgttaattccagatttttaagttgatcagcagaaaagttcgataccccgatagcccgaattaatcctgcttgattagcttcttccaacgctcgccaagcacccacaacgtcaccataaggttggtgtaataaatataagtccaagtaatctagtcccaagtgctgaagcgaagcctgaatgcctgctttagcacgttcgtatgacgcatccgccacccacagtttagaagtaacaaagagtgattcacgtcgaatcccactattttttatcgcacgcccgactgcaacttcattctgataagccgtcgcggtgtcaattgaaagataacccgcatgtaacgcctgcgttaccgcacgttcacattgttgttcatctacaatttggaaaacgccgaaaccaacttgcggcatttcaatcccactacttagtcggaccgtttgcgtcatgaccattttgtttcacacctttctgattgaatgacactatcataaggcgagatggattgtttgaaaattactagataaacatgctaccatacgtttaatgtatgcttaggagtgaattatatgattgaaagctatttattagaagaacttagcgtcttcgcgcaaaccgggacactaacaaaaactgcaacacagttgaatgtgactcagccttccgtcactcgtggtatgcaaaaattggaagacgagtttggggttcagttatttgagcgccaggccaatcacattcagcttacccccacaggcgttcttgcagctgaagaagcgacaaaactactgaagctcaacacggccatgattacgaaggtgcagaactatgatcaaggtcaacacttaactgcgattgcagcgactgttccaggtccattaatcctccttggtgagctacagcccacgcttagcaggcatatccaaattgacactaatgccatttccaatcagcaaattactgacgcactcaataataaccaatacaccgtgattttttctgatcaggagatttttacggatgagattgaatctcaatacattggtgaagaacgactacaagttaacttggatcaatttacttacttagccaatcaaccaaccgtaacctttgaggaactgcaaggtatgagtttcattgtgatgcgtgccattggcccatggagtgcaattattcaagataatattccagaggcgaagtttatgtatcaagatgaccgtgacgcttttgctgaaatcactaaatactcacgttttccattcttcacgactaacctatcgcaaagcgacccgttctttaatgagcaggttaaaaacgataaggaccgggtaactgttccaatcagtgatgacagcgccaaaatggtcgtatatgctaactacttgattgcccaaaagaaacacctagctcccatgcttagcgaaatccaacaacagtggcccaaggcactacaaagtaagtaactattacagaaacctagcgtgatggtaaacattcaaccatcacgctaggtttctgtaaattaattattcaatcctaccgatacgcatgtcataccagcgacgcaacctagcaatccgctaatgtttgctacgacacacactaacctcataaacatcaattagaagttacacattcagcaacactattgccactatccctaatgttgtcatgagtaacggcgacaacggtttgttgatttgcccatgccccgttcttcggctcagctttgagtactaaccagatgccaattaacatcaaactaccaataccaattaatcctagcccgaccttttttattttcatcatccccttaaatcaaagcttatccattaatactcaacttataacaggtctttaaaatactgtttaatcacgttagtttgattagcagtaaaccctgcttttaaatcaacgttttttcgttcggtcaatgaagctaatactttggcacttgccgtaattgaactactagcactggtagtgaacggtacaatcgtttgtccagaaaattgatattcagcaaaaaaagtatgaatcaccattggtggctgataccaccaagtcggaaagcctaaataaatcgtctcataatcattcaattgatggttaagtggtcttaattctggtattatttgctggtctttttcctgctccgcacgtttagcagcttcagtataatcgtctgaataaggttcttctaaacgaagtatctcaatatcagcgcccgttatctcagcaaccgtattagcagcccgtttagtattatccgtgagtgaaaaatacaacactaatgcgttacttgaatttttcattcaatcactcctctcatccaaaaatttcctaccattcaggatatattggattatcttaaatcattatggtactgcaatagatcagtcctcagcgttgtgactatcatcaataattttgttgctttgttgtggaaatagttgtgctgcctcactgcttaaaatatgttcttggaaatgatcgattttataggacaaatatgcaattgtttgtcgtgtctctctcaactgttgcactaattcatcacgttgatcgatcagtaagtctcgtcgtacttctggtgaagtatccggttgatgaagtagtttcatatactcaatcaatgattcaatcaacattccggcctggcgtaatgaccggacatagtagatccaattcaaatcacgctcacaataatcacgattgcaacgacaataccaattccccatcttttcaacttaatcatacctttcttgatttttaacaaacatcatgttaaaccctggtgtgaactccaaggcaagagaaaagtctcattcgaactaactgccaaatggctaactcttaaattctcaacttgacaccaccagcgatttccacatagccacgctcaatctgaatcgtgttcgaatggcccccaaaatgttaaagcggcctaaagttttattttcttgcagcaaaataacagttggcaaccgaaaagtaagttgtcacaaatccgacaatcaatataaacagcccctgaaaccagtccaaaaacgattggttcaggggctatttatcacttaacaaactaggtaactaggagttagctacctaagcagtacgctcaaattttccagtctttttggactagcccatttggtttgttggtcgaataataacttcattccaagcagcatcggcgggcatatcaatagcttctttaattgttaacgctactcgatcaactgaaataccaaacgattcataaaacttctccataccagctttaacctcaggatcagttacagaagaaagcaagtcagtgttgatagcacccggtgagataaccgttacccgaacattattcttggcttctaccatttcttgacggagcgattcactgatagcgcagactgcatatttggttgctgaatagacggcactacctgaatgagcagtgtgtccagcaacagaagaaacgttgataatgtgtcctgccttttgtttatccatatacggaatcgctgcaccaataccgtaaagcgttcccttgatattgatatcaatcatattgttccaatcattgattttcttttcagaaaggatcgattgaggcataataccagcattattcagccaaacgtcaatccgaccaaatttatctatcgctaatttagcgagtgcttcaacctgattatcatcagtaacatcggttgcttgataagcagcttcgccacctaacttctcaatcccatcagcaattttctttaacttattctcgcgccgagctcccaagataacctttgcaccatctttagccactaatttagctgtcgcttccccaataccacttgacgcaccggtaataacgattactttcgattcactcattaataaaacactcctagtctacttttcagtactaaagtctaacgccatcgtggcatatttttcttcattttcagctgacggtgtgtaataccgaatattcttctttacagcagcaatttgagccatttcttcatcagtcagtgtaaagtcaaagatgtcatgattatcacgaatatgatccggattagttgatccaggaatcacaatgaatcccatctgtgtgtgccaacgtaaaataacttgcgcactcgttttatgatacttccgacccagctcagcaaaaatgggttcttgaatcagactcttgtcgccatgacctaatgggaaccaagccatcaatcttgtcccaaacggtttcaaaattgttctaacttcatcttcagtaaagtatggatgtgcttcggcttgaatcacatgcggtttaatttcaacattatccaataactgttgtaatttttcgccttgaaaatttgagataccaattgccttgaccttgccatctttataagctttttcaagttgatggtatccagtgagaaagtcaccagctggttggtgtaaaaacatcaaatcaacatagtcagttcctaagcgttgcagcgtatcatcaaccgcattattgtctgtatagacagatggccaaagcttcgtactcaagaatacatctgaacgactaacgccggaacgtttaataccacgccccacaccagtttcgttcatataagcattagcagtgtccaccaagcgataaccagctttcaaagcgtcaactacagcttgctcagcatcatcaactgacatttgaaaagtaccaatacccatttctggaatcttcacaccattatttagtttaaaagttgcttctgacatatttatctacccctttattattttaattgtgccaaacttgctccaaaaatttgttcaataactcttggatcacgatgatcaaaaaactgactttcgcctttgtccaagttattcagcgcattcatttcgtcactttttaactcaaaatcaaaaacattaatattttccgccattcgattcttatgcactgatttaggaataacaacaattcctcgttgaagtagccatctaagaatcacttgaccattagacttgccatatttgttagcaatttcagcaataactttattagtgaaaatttcgtgcttaccttctgcaaacggtgcccaagcctctacttgaatatcatcgctttgtgcgaagtcaacttctgatttttgttggtaccatggattaacttcgatttgattgattgctggtttgacttcatttgataattccaagttttttaattggtcaccatagaagttagagactccgatggcacggattttaccagctttgtaagcctcttccaacgcgcgccaagcacctacaacatctccatatggctggtgtagtaggtacaaatccaaataatccaagcccagattatttaatgattgctcaatgcccttctgtgcacgttcataattagcatctgaaacccaaagtttagaggtaatgaagagttccttacgatcaaccccgctccgtttaatcgcccgtccgaccgctgcttcgttttgataggcagccgcagtgtcaatcaagcggtaaccagaatcaattgcatcaacaaccgcttgttcacattggtctaaatctgtaacttgaaacacaccaaaccctaatttgggcatctcaacaccattatttaatttaactgtttccattatatgatctcctctttatttaattgatgaattcattataaggtcgatttaactcgctgaaaattactatctaagcatgccagcatacgtcagacgtatggtaatgctttttattgctttttcctctgaattccaagcgatgcaatgaagctcaaaataaaaatcacagcaataatcaacaattgatagtgatagcttgtcgctggattattgaagccgctagtcatggcgacaacaattgacattccaaccgattgtccaaattgatgaactgtattgacgacacccgaagcggcgcccgcaatatcagcatccgtattggcaactcccgcgatagtcagcgggcttaatccaagcccttgtccaacaccaaagaaaatcattggaataccaactgctagccagtatccatgactaagaccaagcacggctgaaagtaggacaccaataattcctgatatgatagaaactagaatcaaacgatcattgccaatcttcattgaaactctagaaacctgggttgcactgaagaattgtggtaatgtcgctggtaaaaaggctagtccagccatcaatggtgtaaatccatacactcgctgcaaagcttgtggtgtcacaaagaagtaggcaaatgccgcaccgatgaagaagaaacgtgcgatgtaagcactgctacgttctctatccataaataatttcaatggcataattggattcttgatgcgcttctccgcataaacaaacagaatcaaagcaacaatcgcaacgatcaaggccaaaatttgatgactggtaccatcaatgctgtataccaaagcggataaaccgataactgataacagcgtccccacaaagtctagatgtcgtgaaccttcagtcttactgtcatgtacaaagaatatcgtcaagacaaacatcagaattcccactggcacattcaagaaaaaaccgtaccgccatgagaacacgctggtgatgatgccacccaaaatcagaccaaagctagcacccaagccagcagttgcaccgtatgccgcaattgctcgcgtgcgcattgtgccttgatagctatccaataacagtgccaaagtagttggtgctaaaatggctgagccgatgccttgaaatgccctcattgagataatcatggcggcgttggtcgatagccccaccattaatgaaccaaatgagaataaaaccaaaccaatcaagaacactcgcttacgaccaaaaacatcaccgatacggccaccaaataactgaaagccgccaaatgttaacgtataagcactgcttacccacgctaacgtctgagaatttaaatgtagctcttgcgcaatctttaccgtactagtaaagataatggaattatctaataaaatcatgaaataacttaataaaataattggcaatacaatgccaaatttttctttgctcttactcattacaaactcctaactttaaagtactaatttggtaaaagacaaacctgcaaatgctttctgagcattcacaggtttgtctcttacataaagctcggcttagtgaattgagtatcaggttcacccaatcctaagttggcttgatgataatcagctttgccggtcaaaagatcaacaacaaattgagcgaccgcttgacgtgtgacttgggcttccgttaaaggttcacctttctcggaaacatgaatcttagtattatttacttggttgtacagccaagtaatacgtaaaataacgtaatccaaatcactattttccactaagtcggccgactttttgagatcagtttgccatgtcagcccagtattttgccgataccatgtttggaatggcccactaacttcttgatacaaatcaggaacattagctacgataaacctctttaccccggccttatctaatgcgtcaatgactcccgtaataatagctggcttagcaacaaaacttaaatataccgcatcaacaccttcggcagcttgtcgtaccttgtcaaattccaaaaaatcaccatcaacaaacgtcactcgtgctgaatcaagttccgccaaccgttgtgagacgttatgaccgaatagcactaagttgtcatctgtttgtgccaacaaatcaccagttaccatttgaccaatttgacctgctgcgcctaaaatcaagactttcataaataaatcctccgtgattattaaatatttctctaatcagtctaatgagcttatgtaacctacttgtccaactgattgaatgacactatcataaaccgattcttattcactgaaaaataccgaataaacatgctaccatacgtttttcgtatagtatttcactcgattacctatggcatacttataccgtcaccctgaaacacctcttaaagctgaatgaaaagacaactttcagccataacttaaatatatttgtctaactataaagcccctaccactggtatttggtattcctcaagacacaacaaaaaaagccctccataaccggaaggcctgattaatcaaaattcatcttatcactatcgaatcaccagtactgaaatcggtgcatgttttgccatatatgcggcttgcgaaccgaagtacttacgaacaccatgcttggcaactgagccaatgactagtaagtcgggctttaacgctggaatcaccgtcttcacgatggtttcaccagggtcaccttcatcaacgaccgcgttaacatccgtcaccccgaagtcacgggccaacttctgatactgctgaacgtgttcttccaaatccttgcgttgaccatgaacaaagtccttgctcatcgcttcatacacattcatattatcctgttccaaaatcgagacgatggttaacttagcaccgtcactcttggcccggttaatggcgtaccgaaacgctaactgcgcgtcatccgaatcatcaaccccgactaagatgtgcttaaattccttaggactcatctctgacatatggctcaactccccattctctgataatctgactacacccttattttcatcaatttaggcgtaattgtcaattatgactgcggtgcattttgtttcaagacacgcgccggattaccgactacgatgacgttatctggaaatgaatgtgttacgacagcaccggcaccaacaatcacgttgttgcccaacgtcaccccgggtaagatcacggcactaccaccaatccaaacatcattaccaatcgtaatcggtgcagtccgttccgcttcagtccgccgcacagttgggtctaatggatgagcaggcgtgtacaagccaactttaggaccaaatttgcaatcattaccaatcgtaataagtccttcatcacataacgtgaccccatggttagcataaaaatgattgccgatacgaatattgacgccataactaaattcaaaggtcggttcaacgaagaaccggtcaccggctgaacgtaagagacttttcatcttagtattccgttcatcattatcagcaatctgattatattgcattaacttcgtccgcacgtctcgccgacgttgctgtaggattggtgattctaagtacaattcaccattaatcatttgttgatacgctgggtcattatcgatttccatgtttaacttccttttaagtatgatactttaagcataccacaccattcaaaattgctgtatgatggtttaaataaacctattgaaagtagtggttccatgcaatacgcaatttttgatctcgataataccatccttgactttgaccgcgctgaagcggctaacctcgcagccgtctttcagcatcatggcgtcactgatattcgccgtgcagaaaatgagtatcaggcctataacgaaactgtttggcaacaaatcgaacaaggtgccgatcgtgatagcttgttagaccaacgatttcaagtctttctaggcacactgggcatcaccgttgacggtcctgcggttcaacaagaatacgaccaattattagcgcacagttatcaggtaattcccggcgcccacgaacttttgcgcacgctgaccaacgctgggctgaccttactcgtcggcactaacggtatcaaacacacccagctcagtcgcttggcaggtgcccatatgacgccctattttgatcatatcttcatctctgaaagtatcggttatgccaagccgaacccacactttttcagcgctattcatgaccaatacccagacatgaatgccacgaataccgtcatgattggtgatagcctgcgttcagacatcgtgggagcgaccaccgcccatttacctagtatctggtacaatccacagcatgtgcataacgacacaacaattgccccaacttacactgtggataactttaagcaactgcaaaaactgttattaacagtttaaacgcaaaaataatcagcaaactctgcgcgcaggcctaacgtatcttaaaaactgaactatttaacatattaggtattatgcggagtagttgtatcgacggcttttaactcaataacctgcttaccttgatttccaatcaacaaaaagaccaattgacgaatcagcaagaaaagcaatttatataaaacagtcgtcgttgcttaattcaagattcggccgtgaaacaatgctaataacagttcatctgggtaagctgtcaaaacgtgccctttcttctcaggtgataagatttgcagatttaatccacttgacgcttgctatcaattaacgtgcgagaagaatagctaaaggaacggactaaaaaacaagttagatgcaaattctcataaaatgaaaacaccgttgcgctaatagtcgacgcttaaatttaaaagaattataagcgcgggtacttttaatacttgatataatatcagcatccatctaatttttttaaagattgtcaccgttaatacctttttatcactgtctaaagtatcactgctttgtgcgccgacaatcaactgctgtatctcctttattggacctaaactatccacaaacgcgattgcaaaagaagtgaaagtagcaagcttcataacataaataaccaaaagtatgtactgatcatcaggatttagaacaaatgtactaacaactaagaccagtattgatactattaggaacagttgcattatcaatcgtattttttcccaccttgtcttatttctttttttgagcttaactagacctaatttcaataagaattgtttttgatgctggattttcttatccataaagtacgttaccaaatagtacaaaccactgtaggcaaaaaatatgagcacttgtttgcatagcgtcgattggaaaatcagcatgagaagctcattcgaatatgaagacattaatttagatagtcctttctaaaattacctaagtattttagcttagatagcagtatttaataaaaaacgttgtgtctagatttctcattgaaatgaagcacaacgcttttggtattaaaaaataaatgattatacgcatgaagaataacactattatgattcatcaggtcagacaagggtcattgcccatgcacctactttgacagcggagattaaattcaggcgctgtaagtggaaaacctgcattattccaataaatttcgataatagttgaaagtatcattgcatgatctagtatatagatagctgggaactaagaacacccgtggctaaatataataatatgtattgtgcgtatagtcgaaattcattaacataatctgcaaagcctattgaatgggcacactgcatctcatacgatataaagcaggtaatgttcacacttttatttaaccaaaatagcgtaaagacataagaattttcacgttcctcttattgtgcctatcggatatttccgtagctaagtgggcggagttgattgactagactcgtatcaataccattgtcctcatcaaaccgtataaacaataattaacctcaattaaaaaaagccatgcagccccattcttacagttacgacacagtaagaattaggcttcatgacccataacacgattcaaatttaaccacgcggcgacgattggcaggaacacctgtcaattgatgcccaccgcacggcccaatcaaagtgacactagccacaccttttcttacaaggtcagcactagctattttggtccaaaagtgaacccctttttacaatccactattcttcaatctgaacaaagtgtgtattacctagtccaccgccaacttgcatgacactgccgccatgccgaagcttgcccaagttaacggggcggaaattcaacggccggacgagcgcagcgaattctttcttggcagcaacgtcatcgcccgcatagaacaagacccgctttccaggcccatcaacgtgcccatccataaactccggtggaatcgtattgaaggctttaatgacccgggcattgttagctgcacgagcaatgacttcacttccagtcaacggggccgtcttaattttcttaaagtcagccgtaaactggttcgtcacgtccaccacgatccgttgcttataatcggcgacctgcgctaatactgccggcgcctgttcaaacggcactgcaagaatgactaacggctgttgtaaggcttcagcaacttctacaaaagccacattggcagcaaactcggcgcgccgtgttgctaaactagccgcaccactgtgccgacttaatttgatttgatgatcaccacgcgcaaaggtcttggctaatactgtgccgaccgtaccggcaccaataattccaattttcataactatcctccacctcatcttttaataatggtttgaattaaccgacttatctggtccgttatcacggactgtcagcggtcatctagaccaaaccagcttatcttaatgatagcgaaatcattatggaattgcacctcatacgcgtcaactatgcttgaacttgttggtaagccgtaataccagcttttaatcgtgccaatccatccgtcagggtagtcgttggacaagccacattcagtcgcaagaagcggttgccatcaccacggtaagcatctcccgctgataaaaacaacccggttcgttggcgaataaaagcagccaaagccgcactgtcggttgtcacttgacgcacatccaaccataatagataagtcgcttgggcttccaccaacttgacttgcggcaactcagcagtcaagtaagtctgaacttgacgttgattggcagctagtttggttcgcaatgcagctacccagtcatggccttcagtataggccgcaatgctggctggaatcgcaaacgaattgggctcagccaattcatcattgttgatgccccggctcactaatgcgcggacgtgtgcatcgggaataatcaacgttgccgcgtgtaaggctgccacgttgaaagtcttgcttggcgagatacagctgatactgttatgtgctactggcgcagtcaatgatgaaaatggggtgtacgtgtgaccgttaagggtcaagtcacaatgaatctcatcggcaacgactagcacatggtatttcaagcacagctcgccaaggcgttgcaacgtcgcacgcgaccagacgatgccgatcggattctgcggattgcataaaatcatcatcgtggtcaacggatcagctagtttcgtcgtcaaatcgtcccaatcaatcgcgtacgacgcgtcacgtgccactaagtcactactcaaggtatgccggccattgttttcaattgaatgatagaagatattataaaccggagcctgaactaacacgttatcgccagccgctgtcattttacgaacaattgatgaaatcgccggaacgacgccggtgcagaacatcaaccactcaatttgcggacggaagttgtgttccgttgcccaccagtctgccacggcttcatagtaagccatggggacttcttcgtaaccgaagacgccaaactgggcgcgttttatcaacgcttgcttgataactggtgccgtttcaaagtccatgtcagcgacccacatcggcaactcatcatccgcgacgtcccacttaacggcatttgtgtgccgccgattaagcacggtctcaaaatcaaacggcatggggtgcacggctttcatggtcaacactaatcagggtctgatgaggatctacttcaggatcatccatgatgatttcaccaatggcttgcgcatgaatccgaccactaagcggatttttaacgctatcaatcgttgaaaccacgtcagcgtcaatgttacgacaatattcaaaagctaagtccgtattgagtaatgtacagttttccaacttaacattatccatgtaacacaggccctgatcgctctcaatcgtacagttgacgaaccgaatattcttcgaattccagcccaggtactcaccaatgatttgtgaatcataaacggtaacattttcacaattccatagcgcatccttggtcatcagcgttgcatgatgaatttcaacgttcttagcaccgtcaaaggcgtaattaccgacgaggctgaagccatcaatgcgaatattctggctattcattccaaaataatcaccagctgcttgaacatcattcaacgtaatatcttggcagttccataacgtttcttccgcatctgaaaagtgaacgtgcgctaacttaacttggctggcccgccgaaatagcttaggtgcctgtagcgtactattcgtaattgtaatatccttggtgtaccagatgccagagcgagacattgtctcaaacaagccttgatccacagtcacatgttgactgtaccacaagggatatttccacttaaagattggctgcttcaacgtgacattgcgactttccttcagtggtgattcaccatcagcaaacgttgtagtgtcgatttcaaggtcgtgagctttaaagagtgcccgctcgcccgttaaatactgttgtgtgattgttttcaatttaatctcaataactcctttatactgaaacgtggacctttagtcgcacgataggatcagtgtattacttcaactgcacgttaagtcaactaacttgttcgcttactgtccggaatactgattccaattattagttcgtgaccggttaagtgccatcacgccctccaagtcatggggttggtaaggggtttccaagtactgtatttccgaagcggttaacgccaaccccgctgcctcagccactgcatctaaatgatgcggcttagttgccccaataatcggcgccgttactcgttgttgtagccaggccaaattaatggccgccattgaaacatgatgttggtgggccagttcctcaacgcgatcaataattggtttatccatctcgctggtagcttggtatttggtatcagcaaacgtatcttgttgtcgccgagtagtctgggtgccaaaaggatgtgccaaccggccactagctaatggactatacggcgtcgttgccaaaccgttctcatgagcataactgaacagttcccgttcatcctcgcgatagaccaaattataatgactctggatcgagacaaattgtgggtaaccataacgaaccgctagcgcattgatctgcgcaatctgccaggaataggcgttagaaatcccaatgtaacgaaccttaccggcctgaacagcttcattaagtccagccatgatttcagccattggtgttaaccagtcccagatatgataaatatataaatcaacatagtctgtctgtaaattctgtagactctggtcgagggaccgcaagacgtgttcacgcccactgacatgattttcgatttcttgggttgtccgattcgtaaacttggttgccagtaccaattgatctcgctgaaatttctttagtccttgtcccaagacacgttcactcgcacccgcttgatagaccggcgccgtatcaaaaaagttaatccccagtgatatcgcgcgatcaagtacctggttcgcctgcatttgaccaactgcccacgagcgctgattaagtgccgttccagtccccgcaccaaagcccatacacccaagtgcgatcgacgagacttttaaatcggatgttcctaactgtcgatattgcattgcatcacaactcccttcgttaactcattaccctctttattaaaacgcgatccgttggcagagtaaaatacctagttcaaataatcaattataaccattccgtatagttatccgtcatccagtcgttttaggaattaatgaccgttattagtcaccaatcattattttcaatgtgcctggcgacatccaagcgtggcaccgtactccaggtgttgggccaaaaatgaacagcacgtttgcaaccataccaggccacatcctgcagtgagtgtcaccgaccgattttaaggtcgaaccactgataaaccggttttgtgggcaccaccacaactcaccgtgaccacctccgccaactcaattttccaacacaaaaccgaccattctggaagttacaccttttccagaacggtcggtcatgacaactgattgaatcgccgtaagcatcgctaccgacacgacgacaatgtttatttcagttttaccttaatttttaactttttaggcgcttgatggcgcgctaagattaattgccagcccactttaaccagcgtactaataacagtcatcacgaccattaacgataattttcgacgcattcggcatcacctcaattaatttaaatcgagcataccacactttaatcgacgtgagcggaattttgcaactgaatcatatcatagtagtaaccatgctgttgcaatagctcgtcgttggacccgcgttcaacgatttgcccctgatttaagaccaggatcaaatcagcattttgaatcgtggacaagcggtgggcaatcgcaatcgtcgtgcggttctcctgaatccgatccaaaccagtctgaatcatctcttcggtctcagtatcgacgttcgccgtggcttcgtccaagattaaaatcttagggtcagtcacaatcgtccgcgcaaatgaaatcaattgccgctgtcctgaagaataactggccccgcgctcaatgacgcgtgactgataattctcaggtaaatcgttgatgaagtcatcggcctttacaaaccgtgccgctgcttgaacttgttcatctgaaatctgatcgttaaacattcggatgttggaattaatatcaccataaaacataaacggttcttgcaagaccaaccccatcttctgtcgcaattcctcagccggatactcacgaatgtcgcgatcatcaattaaaacttctcctgactgaaactcataaaaccgcatcaaaacattaatcgtcgacgtttttccactccccgtctgaccaactagtgccaccgtttggcctggttcagccacgaatgaaacgtcttttaagaccggatgctggccgtcataggcaaaggtgacgtgccgaaattcaatcttaccgcgcgtaatcttagccgtaggatcgacgtgttgggccggggcaatcgttggatcatccatgacccgtaaaacccgtgatccggcgacgacgccatcttgaaagtctgacaaattatccatcatcgacgtcatcggattatagaagttattcaggtacgtgatgaacgcataaacgaccccggcagccacataaccattgagtccacgaaccccgaagattcccagaaccatgaccgtccctaacgcataaaacaagtcgatcagtggacttaataataatgagttcgtccggatcatcgcttggcgggtcttaaaataggcatcattggtatgatcaaattcaccattgatacggtgttcttgtcgaaattgctgaattacactaattccagtgattgcttcacttaacttggtattcaactcactgagccgttcccgcattcgccggtaaacccgtgagctataccgttgataataccaaatcgttacagccaaaaaaggcatgaaaaccaataaccacaaggcaatctgcgcatcggtgagatacatcgcgacaaacgacgaaatcaccgcaaaaaaggcggtaaataatgtattaaacaacgcccaaaaattggaaaacgacatcgtatcgttagtcaggcgtgacaaaattgagccaccagggacttgatcaaagtagcgcatgcccatccgatgcaacttggcgaacatttgtcggcggacattttcaagcatatattctgcccccatcgtactactgaagttctgtacgaactgcatcaacgcgcgcacaaccatgccgaagaaatagaggcccgcaaagtaccacatgaccggtaccgtggcgtgtcctgttttgagataatgatcaataaaggtctgtaatacacgcggtagatagatattaaccacactaatcagaccggaaaaaacgatggccgcaataaaaaaacatttgaacggtttcgcatacggcaatagtcgccgaataaccgtgagttgttccttaacaggcatggaacgtgcccataccgattgacgtgctgccattattgcaccgctccttccactttggtctccaattgttggcgcgtaaacatcttctgataccacccgtgttgcgtcattaattgcgcgtgggtccctcgttcaacaacgtgaccggcatccaacacaatgatttcatcagcgttcatcaccgaacttaaccggtgggccgcgataatcgtcgttttgtctgctcgttctgcctttagattagctaaaatttctgcctcagtttcggcatcaaccgcggataacgcatcatctaagatcagcaattcaggattgatgagtaaggcccgcgcaatggctagtcgttggcgttgccctccagatagcgagataccttcctcaccaacttgggtatcgtaaccagcgggcatgctggcaatctgaccactcaaatcactcttggtggcgaccgcttccacaacggcttgactcacagtcggatcggcaaaacgaatattttcacgaatcgtattcgagaacagaaaactatcttggggcacataaccaagggctggtaagtaactatcaagcgcatactgcttaatatcgtgaccaccataagtaatgtggccctcgtactgatcaaattcacgcaaaatcagtttcataatcgttgatttaccagcaccaacccgcccgacaattccgagcgtctgtcccgccttcaaagtaaagtccacgttactcagactggttcctgcatcgttgggataattgaactgcttgatttgatactgaatatcaccatgcgggcgctgttcaatgccccgtttggcatcaataatggcactttgctgattcaataattccatgacccgatcatacgaggcgtttccccgttccatcgtgttgaataacatcccgaccgcaaacatcggccagaccatcattcccaaataagtgacgaacgagaccaagttaccgattgtaatgacaccgtgggtcacgtacaacccgcccaaaataattgtggcgccgtaagataacgcaataatcatggtaatcgcgggatcaaatagcgagtcgagtacgttgacatgccgattgatcttaatcgtctgatcaatctgttgattaaaatcagcaacatcggccttttcctgacctagcgctttgatcactttgattccactgatactctcctgcgccttattattcagtcgcgaaaaggcggcttgggaggcacgaaacgcgacgtgaatttttttacccaaataccgtgacacgatcgctaataatgggaaaggcaccaccgcaatcagcgtcagtcgccagtcgattagtgtcatcatcgcaatcagcgttgtcccaccagtaataatggaatccgcaaattggagaatgccaccaccagcgacccgttcaaccgccgtgagatcattggtcgcatgggccatcaagtccccggtacggtattgctgataaaacgtcgcatccatcttcataaaatgccaaaagagtcgttcccgcagcgttcgttcaaggccggctgcaccaccccagatggcattccgccataaataacgcgccaggtactgaccaacggcggccacaccaataataactaaatagaccgtcagcgtgtgcgccgtcaagctgtgctgattaatcccatcaacgacgtccccaataatccggggtggcacaatgccgataatggcagtcaaaactagtccaagcaccccgcgaggtacaacttccattcacgccgaaaataccagcctaatttcaaaaatatactcacagcgcacctccaataatttgattaaaatttaattagacaactttttataataccatacctcgcgcaaaccccttaatgataagttccatcccgaatgcaaagtgattgcaccagattgaaaataagcttaaactggggacgttagtgggacggtcattacgatcgtccctttcaatcgtaaaaattcagattactgatttttaccaccgactattgggcttggtgagctgtccaaaatacgccaattatttttataaggagtgttgattgtgtcccaaccaagtaccgtcactttaaaaaccaaactggcaatcttatccgttggtttactctcatttgtcgggattctcgtggaaacatcgatgaatgtgacgttccccacgctgattaaaacaatgagggtttcactagataccgtccagtggctgacgaccggttacctattactgacaaccattgtcatgagtaccacggcctatgttctaaagcggtttaaccccaagcccttattcttatttgccgccctcgtgtgtctgcttgggggcattctttgttggttagcgccgaatttccccatattattaactggccgccttttacaggccgtagccactgggatttcgattccactgatgttccagttgattttcacttacgtccctcgcaatcaactaggaacttataccggtttagctagtgtcatcgtgtctctagccccggctctcggaccaacttatggcgggattttaactagcgtctggtcatggcgggcaattttcgttggtatcgtaccgttattggcattactggcaatcttaggggcgttcaacatttcggggaaggccttaggtgttggcgataaaaaattcgactatctgggcgcaatccttttagccatcaccttcactagtctgttgttcacgtttaacaacgcgggaactcacggctggctgtcgccgaacttcggcctctggtgtctgtggagcatcgtgatgattggtgcaatggtgacgtacgccatcaaggggcgtcgccaactgattgattattcaattctcaaattgccaatcttgcgacttcggctatttaattactttggtttacaattcattaatatcgggttgtcgttcgttctgccacttttcgcccaaaccgtccttggggcttcggccatgacggcagggctcatgatgcttcccggcgcaatcgtcggcgccatcactgggccaatcgccggtcgaatttacgataaacaaggcccaacgaccttattaacatttagtgccatcatggcgagcgccgccttactattattctggctgacaaccgattacttcacagtcatcatcatggctgtcatttacgcgctactacgcgtcggctttaatactggttttgggactgcgatttcggatggtagcacccgcgtccctctgcctcaaaaatccgatcaaaactcgatgttcagtatgatgcaacagtacgccggttcaatcgggaccagtattatgtccgctgtaattgccggctatgaaattcatcacccgaccgtaactggaacaattatgggaagcaagttggatttcttgctattattcgtgttggcgatcgccattttgattagtgttctgcatgttaaacgacttgaaataggacaaaactaggattgactggtagcatcgttagtcttgcaagtggattgattgctgcatttttggagattaattatttaaatgctttaaatctacatcgaaaaggctcaggatctctttgacctgggcctttttgcgtactctagcatcaataaacacactattaaacagattactatctcaatgctttctaaaatagagtttccatattatgatggcataattgaaaactagtgacattacaaaataaataatggaaatacccaaaacattagcacagtattctgtaaaccaatatttgtattgtgtgagaagatcatatccaccatgtaaaacaaaaaaataaataactgatattccaaaaacaatcatgctttgtttgaaacttgatttaaaaacagccatcatatcctactcccatctgttgaaaccggtttcgttttttcttattatacatacgcaattcaaaaatgtacactaccggaataaggaggaaattcaatgaattacaccagtcaagctaacattcacaaatttacagtatctttggtcattattttattgagcagtatcctaatatctactaccataactttgaaaatttctgccaatacaacatcatcgtcacaacaagccatagattgtatcgctcaagaattagcagatgtatcaaatagcattcggtatgatccccagactggattagcaacaaacttagatgtgaacgctttagtatcaaaatacggttccaataaccagaaccaattgcagcatatcaacgagataatgaaatatgaatacaagcgaaatttgcaattcaaccaaggcaagctaaatagtattcaaactagaagtttttggtcctgtatgaaaaatcaattattggacatgattggctatcaaactttccaagcattattacgcggaggcattcaaggattaatccaaagaaaggcgtggaaggcagcggctaaattactaatcagataccttggagacggcatcggagtcggttttatcgccgcacaattatcctggtacgcgattagatgtgcctagttattcattagttgcgctcactcgtagaaaaaagtaatgtcttcgaattatggtatcagtaaaattaaaatttaacccttttcgagaaaaaaaacgcgcccccaagacgcggtttttcgtcttggaagcgcgataatatgattaccagtaattacttaccagctttcatctgaatttcagcctcggctggaacttgcatatcgtgttgcttgagaaagaccatggaagcccacagtaagcccagcgacacaatcgtaattcccgctaagacaacgattgatgaccagaagataccactaccccaaccaccagttaaggcttgccggaacgcttgaatcgagtacgtcaatggcaagtatgggtgaataacgttgaagaacttgttggtaatttccattgggaaggtcccaccagaaccaccaagttgtagcatcaagataaccattgcgacgaaccgtcctgggttatcgaataacatcgataagaacatgactaggaacattgacgctaaggcaatcatgattgccgtcaagtagtattcaggtacactgattggtttcaaaccagcaactaataacactgtcgcttcgatgaccgccatcgcaagtgctacgggaccaccaacagcaactttactccagaaccattgtgttggcgtgccatcgtcatccgcaatccgtcgaattggataagcgaagttgaagacgattgccccaacatacaaagccagtgacaagacgtaaggtgctaacgcatgaccatagtttggcacgtgcgtgtagtctttataggacgtcttagttggcgccgccatcattttcgcattcgcgttctttaatggtgtcgcgttaacttgatccgcaccttcttgcaaggaagtcgcaagtgtcttgttaccgttcttgatctgctttgtcccggataggagtttggcagaattgttgtcaagctgggtggcaccgtcatttaattgactgacaccactcgttaattgaccggtactaccttgtaaggtttgcaagccactgtttagttgaccggcaccggtgtcaagttgttgaacaccacttactaagactggtacttgaccgtttaacgttactaaaccatttgtgactttgctagagccaacatataattgttggacaccacttactagaactggtacttgaccattcaatgttactaagccatttgtaactttacttgaaccagcaaagagttgttgaactgcacttgccagaactggtacttggccattcaatgttactaagccatttgtaactttgcttgaaccagcaaagagctgttgaactgcactaaccagaactggcacttgaccattaagggtaactaaaccagttgttaccttgccagagccaacttgcaactgttggacaccactaactaactcagggagttgaccattcatagttaccaacccagtcgtaattttgttagaaccaactagtaattgactaactcccccttgtgctgtgttaataccattagtgagggtttgagaaccagtactcaatttatttataccggtgatcattgcgggaacactgccgttgactgtcttcaatccacccgtgaccgtttgggaaccactaaacaactgctcgacacctgaaaccaatgttggaattccaccattcagttgcgcagcaccagtcgccagttgtgtggtaccttggttcagatcatttgaattagcatccaattgctgactaccattactcaattggcctattgcgcccgtaatttcgggaaccgcgccattaagtgtggtgagtccagtactcaaattattagcgcctttattcagctgagctgactgtgaagccaatttacttgtacctgttgataacgactcaattccactaactaatcctgggacttgcatatttaattttgtcaatccattacttaaaccatcagtcccactttgcagcgccttcaacccagtggttaattctgctgaaccactggcaagctgactaattcctgaagtcgtggaactaatatctgaaataatggtattcatcccagcttcaatctttccgtactcagttaccaagtcagtattagaattacttgttgccgaggtgttctccgcaactaatgactctacctttgatagactactctgcaaattttgaacttgttgcgcattagtagtcgtcgtcgtgctttgtccaacatcttttagactttccttaattgccgcaacctgagtatcagttaaattctgtgaagattttaagccatcgattttactattgatttgtgacgtaatatcagcttgcgttggcgactgggaagtatttaaagcatctacgttacttgataaggattttaacgcggtatttaaagcatcgttattattactactcttcgtgttagcagcaatttctttttgactagctgccaatgcctgttcaaattgtgccatttcagtcttcaaagtttcgatttttgtcttagtcgctgaatcatttactgcggctgacaattgatccaggccatcagaaattttcgcactatttgtttgtaaatcgctaacaccggcattgactgtttgcgcaccggttgttaaatcgttgacagaactactcaaattagtagtatttgatttcaataggctggcaccatcattggcggtaccaacacccgctgtataatctgcaactccgctagccaattctgttgagccatcagaaagctgcgaaacactactagacaattttccagtttgaccatctaatttagttaaaccagtcgtcagctgataaacaccatcagtatatgtggcaactccgactttgaccttttgggacccatctgctaactgtcccgttgcattactgattgtcccggttttgtcattcaaattctttaatccagtcgtgaccttgcctgaaccatctgtcaacaaattaacagcaccagctaatgtcccagctttattgcctaatgttaacaatccttcggtaatcgactgcgatccaatctgcattgtcggtaattttgagtcaagttgttgtagaccattagaaacttgagctgagccgtttgtcaattgactgacaccactcaccattgggacgactttcccttgcaacgtagtcagcccagttgtgacttgactggaaccatctttcaactgactgacgccactagccaacgccccagtcttaccattcaatgttccaagcccattagtaacttgtccagaaccatcagccaactgactgacaccactagccaacgccccagtcttaccattcaatgttccaagcccattagtaacttgtccagaaccatcagccaactgactgacaccactagccaacgccccagtcttaccattcaacgttcctagcccattagtgacttgcccggaaccatcagccaactgactgacaccactggctaacgccccggtcttactattcaacgtatccagaccggtcttcaacgcactaccaccatcagcaagcttggcaatcccagcaggtaattgctgcactttcgtattcagctcagtcgtcccgttcttcaacgtatgaacacccgtcgtatacgtcgtcaagccatcctgcagttcaacgccaccatctttaagcttggtagccccatcggcggctttttgatagcccttaccggcagtccgaatctgcttgaagattgctaatgcgtaggccttagtgacttgcgcccgaatactcttattaactcgtgaaacaccagtatcggtaatgactttagcaatataattcaacgattcgttggtctcataatgcaagttcatctttttcggattggtatccgtcatcgttgtggcattttttgagaaattgctaggaatcgtgacgaccgtgtaatatttccggtctttcaatccctgcttggcttttttagccgacacaaagtgccaatccaaatcgttatttttctttaaattcgtcacgacttgcttaccaactgcaaacttttcgccttgatagttcactgacttatcttcattaacgacagccactggtaagttttgcgtatccccatatggatcccacaccgacttcaagaagaagatgctgtataaaaacgggatcaaaatcatgactgaaactgaaatccatagtattttgctatgacgaattgaccgccattcgtcgcgtatcattttcacaacctgaaaccttccttcaaataattaaactgtgtgttgctcaagtgaaaacaccgtcgcaagcgtcccctgaatcatcgcctgcgtgctggccgcctgaccatcacgatgaccgttattgagccactggacaatacttgtgacgaccccactgactaagtacgccgtcaaatcgggatgctgcgactggcgaatcatcgcaaaaacccgatcatccgcacccgtctcggcgaccgtgacaaaacagtcattgatcacttgttgagaacgggtattgtcaccctcattgttcgtcactaataaatgtcgtaaaacttgcgtgtgcgccccgataaacgtcgacataattgccgaaccaaccgtattagttcgctcagcagccaatagttcatctaacgtgtgcatcaccatctgcctgagcaaatcaaatttatccgtataataacgataaaaactactgcgatgtataaatgcttgcttacagatctgctcaaccgtaatttgtgagattgaacgttgctccaacaattggtacatcgcccgctgtaaatccagctccgtacgaattgaaattaccatcaccccgttttttaaattcttatattcgaatagaagaatatagttaccataaaaacaccgctgcatccccgtgcaacgattgctggtgttcatgcagtttagtgcaagtacggtttcaattccaagtccgccttaagcgtatgaatcaaatgctcaacttgcgttagtggcgcgtcaaacgtcacccggtaatagttacgggtcccctgatgttcaactgcgacaaagtgtcgttcctttaacgtcttcaattgatgcgaaacggccggttgcgaaatatgcatccgttcagttaactcaccaacagtcatgccctgcgcgtgttgcgaaagttcaatcatgatttgttgacgccgttcatcggctaagacttcaaagatcggaattgtttctcgaaattcttgcagtgcttcttcactactgaccatgcgattagcctcctatattcttatattctaatgttcgaatatatcaatgataaagctttttgaatccgtttgcaacacctaaatccactttgtcggtaaacgcgacaaattattatttttgtcgcatttgacgcaaaaaaaagacgcctgaccacgcagtcagacgtctccaagggtaattagtactagcaatcaaaacgattgatagcaacgtccggttgggagccggagccgttgtatggaaaatcataggtgtttgggaaggccccatgatctaagacatcgcgttacttgttaataatgacagaaacatcagcaaattaacggcggttaagtaactcgaataactacagtataatcgctcagtgaaactttgctagtcctactttgaaccttttgtcgtaaaacaggacatttagattaaattgttgtatgaaacaacgacgtttaacagccgaccgtgcccattatgctgacctagatgactgtcttgccgcttaattcaacgccttcttcacatatttgtaaccatacttaaccaactcgcgctcgacttgcttactagtggtcgtcgattgagacgagcgactcgcactcgtattctgactactgctgactttgtcagccccagcaacctgcatcgtcgaatccgctttcccacgaccagtagcatagtcgaagctaacgccaggctcaacgttccaaatatagacattgaaattgacactgccatcggttgaaactgcttgcgaccagtaaccacgaggcatcaattcgttgccacgaaaaaccgtcgtcacacgataaatgacttttttaccttgttctaacgccgtacgcacctgatcttcataaatctgcatcgttttttgattcgagtaggccgtctgagttgccaagtttttcgggttatctaagctaccatcttcaccagcgcgatactgcccattagacgtcaagttaaaggataacgtgtaagcaatcaagtgcccgcgattttgcggatagacccgcttaccattaacggtaatcggttgattatgccagccagttgggctccacgtttgcgccgtccgtccttcagaccgtcctaaattggccttgctcaagtaagccgtgtccgtggttgtccgattcaatgaatctaaattaccgtaatcaatcttagaatttttccactgactcgctgccagcgtactcttaccgctattaactttgatggccgcagcactgcccgattgataagtcatttttgccagttgtttgtaagtttgttgcgtattaccagtcgcactggtcgtttgattacgactggattcagactgctgactagtcgtcgaactcgtcgtatccgtaccagacgttaacaagctacaaccacccaacagcaagctcaaactcaagagacccgctatgccaacgcgtcgcattaatttcaccatgattctcttccaccccatcttttttaagtacggttctatcataccgtacttttacaaggggaacaaacgttttcttttaatctttttgtacttgccagtcgttccttagaatcccatacttgaccgagtcataatactgcccttgccaataacgaacttgtggaatccaggcctcctgctttaatcccacggcttccgctaactgcatcatccgcatattccccgaccacgttgtcaatccaatgtgcggcaaagtcgtctcctcttggaataagtgggtcaaccatttagtcaacgcggtgcgcccaatatgctcaccccaatgctcctgattatagataatgatgcctacctctaaccagcgtttgagggaaccatccacaaagtgccaattaacactgccgacaatcacaccatcccgtgtgatgacccagttacgcggtcgaatcaaccaatcacgggggccaataattgtctcaaagtctgtttgagtcggtagttggtcatgaaaatacggtccattccagcgcgtccactccgcatttggatcactaaaacctagttgccatagcgtcgttaattctgcgcgctgaagcggtcgaattgtaattgttgccgtcatttgatcacgccctctcaattcataggtctactatatcgaaaaaccaccctaacaacaatcacattcgtggacatataaacttacattaaacggccccttttccagcgaaccgaagctggccgtccttgactttagctcacttaggacaacgacagctcaaaaaaaccaccattctggctgaaagaatggtggtcataagtcttaagcgtgtgttgcaagctgtcgcaacaattttagtatagctgctgaaacgcgtttcaggtcaagcactaagttggcgccaggttgctttggtcagtaagtaccgcatgacgtggatcacttcacctttatcactggtaaacgtgtgcagttctccagccgcttgcatgcccatcttagccatcactcggccagaattagggttggcactcgcatagtgagcctcgatggtctcatagttcagcgtttcaaacccataatgcatcaaacaattgccggcttccgcaacataaccgtgcccccacgcagctgggcttaaagcgtacgtcaattcaccagtcgcaccactaccatgaaactcataaaacccaatcagttgatgatcacggcgacgttcaatgccaaaaacagtggtcgtgtctgccaaaaagtgcgtcgtaaacagttgctcgaacgcggccggactctgaacccgtcggtaacgtaaataagcgacaacctgcggatcaaaaatcatgtccgctaacgcatcatgatccgccgctgtcattggtcgtaatatcaaccgttccgtttcaaactgagtcaaattgccatctccaaattattattgattcgttaattataataatctactggcaaatgtaaattatttcgttccactctcaatgatttggcaaagtcacctgtgccagcatcgcagttcctaccgcttcaaatcgggcgcagttctaaatccaattctcgcaaattttaaccacaataaaagggccggtaaccaaccgtccctttctctgatcgacttgcaaaccccaagcttgccattgtgtatgtgcctcgtcatggacccagcccatcccgagaggtataaatgcttgtcaaacgttatgattcagctaactgagctacttatcactatcaataattgcttattaacaatgtcctgacaaagtaaatcgatccggctcccaacctaaatccgctgacaaagcgtatgtattgcttcataactttgtctttagtatagcgagccagcattgcgtttagataacacgaagattacaaaaatgttacaactggtctaaaccaactaaaagttagcctggtattgcttaatcgtctctggctacggacacccagtttatctttaacgaacaaagtcgcccactatggtcttaacagtcggcctttattgagctgaaagccgttgattgacatgtacttgaataacttgtcgccgagaaccggtcaagaaataaatcgttatgccaacaaaaataatgacggtagcaccgattgtttgccattcgaacacatccggcttaaccattgtctggctacctgatgccatcatgctcaaaatatcaatagcagcatggatcaccatcggcagcaagatactacctgagtataggtacgtcgaggctaaaaaccagcctagtgtcgctgcaaaaatgatttgctcaaccgtggctgacaagggttggcccgcaaaaacgtttgtaatatgccacattccaaataggccaccgcttagccacactgcccagtcgatctggtaacgccgatgccgaaaagcttgtaataacaaggttaaaacggcaaaacgatacaaccattcctccgcgattcccggttctaacccactcaaaaacattttccaagtcgctgaccgtagctggaagtcccaatgtgtgaatgtcgtcgcccatgaaccacctgcactaaaggcattccatagactaaaagccgttcccaccacgatcagcccaaccactaaactagtttgagcctgacgattaaaccgccacgatgggcccgtcaatccccatccccgcagtaagaccccaacagcaatcacaaagcccagggcgcctaaaataccagtatcactgaccatctcgaatactgatggtgcttgcagattcggtaaaatcaaaaaagtctgctgcgcactgacgacaccactaaaaatagccgtaattaggaccgcaatccggccaatcacagattcgatcggtttagtgaccaccactgccaccggtacgaatgcgaccattaaataagccatccccacagcaatcaatccctgctcgtctaaccatgacagctgacttaaccaagccacgaggttcgccagtaaaatcggcaagagtgtgaactgcagtactgtttggacataataattaacatgtcgcaaacgccgccactgtgcttggtcctcctcggcagctggccaccaggctaacagtccccatatcagcaactgcataccaccaactgggaaaaacacaccaccatcaaacgtaaatagttgaataaaggccgcgccaaataacacgatgagctgccccatgtaccagcgtcgtaataattgttcggtttccggcgtcataaaaaaatcccccaatctgatatgcattaatcataccagattgggggacgctcacacgtgattttgtttagatttatcggattccacgactaactaataaagatcttgcacccggccctgtgttgcttcatgggccaagtattcatcataagtcgtatcaccacgatcaacaacgcctttcgcactcacttcgacaatgtggtcggcaatcgtttgaataaattcatggtcatgagaagtaaagacgatggcgcctttaaaatcaatcagactatcattcagtgcggtaatggattccaggtccaaatggttggtcggatcatctaataataagacgttagcccgactaagcatcatctttgataacattccccgtactttttcaccaccagatagcacgttcactggtcgttcaacatcgctaccagagaacaacattttacccaggaaacctcgcaagaaagtattgtcactttcttctttcgatgcaaactggcgtaaccaatcaataattggcaattcactacccgcgtattcttcattaatatctttaggcaaataagtccgcgaagtcgtttgtccccaggtcaccgtgccactatctggtgccatcgacccagcaataatttgcatcagtgttgtcgttgccaaatcgttgcggctgatcaacgccgttttttcattgggacggagcgtgaagctaatgttatcaagaatcttaacgccttcaatcgacttggagacattctcgaccttcacaaggtcattaccgatttcacggtctggcgtgaacttaatgaacggatatttacgtgatgatggtttgatatcatccaacgtaattttctccaattgtttcttccgtgaggtggcttgcttagatttcgaagcattggcactgaatcgcgccacgaattcttgcaactctttaatttggtcagctttcttggcattggcattcgcttgcaacttggccgctaactggctagattccatccaaaaatcataattcccaacaaatagtgtgatcttgccaaagtcgacgtcacacatgtgggtacaaacttgatttagaaaatgccggtcatgagaaacgacaatgaccgtcttttcgtaaccagccaaaaagtcttccaaccagctaattgattggacgtccaacccgttcgtcggttcatccagtaatagcacgtcggggcttccaaacagcgcttgacctaataagactttcaccttttgcggttcagttaactcgctcatcttcaagtgttgcatcgattcatcgataccaaggttttgtaacaactggtccgcttccgactctgcgttccagccatccatttcggcaaattcgccttctaattcagcagcccgaatcccatcttcatcgctaaaatcaggcttggcatacaacgcatctttttcagtcatgatttcgtataacttttcgtgaccacgaataacagttgctaacacttcttcatcttcaaaagcaaagtgattttgattcaagctagacatccgctcgttaggccccatcgagaccgtcccagtagtcggttgtaatttaccttccaagatttttaagaacgtcgacttaccagcaccattggcaccaataacgccgtagcagtttcccggcgtgaattttaaattgacatcttcataaagcttacgtgttgaaaactgcatactaacattatttacggtgagcattccattacctcttcttttttaaagtgaaattgtccgatagaaaagaggtcggaattaaacaaaccttccagacctctgtgtcgttaattatataactttaattttagcatgctttcagctcgtttggcaatcaaaaccatacgtgattttctgaaagcatctcatcattttcataaacaatccaaattaaccccacccgtaaacaccagttttaaccatgtctagtgaacaggcttgcgcgaccaaagccccgtctgacgatcatcacgcacaccaagtaacccaagttagcaaaatactggtctcacaaagttaactcaaaatatgttgttcaatataatccaatacaccattgtccacattggtacctgtcaccgctgtcgcattggcttggacattttcaggcgcgttttgcatggcaaccgcatgggtcgcatagtgaaacatctcaagatcattggtgccgtcgccaaaaactaacatctcatccggcagaatacccaactgttcaccaagctgtttgagggcgcggcctttgtgcattcccggctgaatcaagtccatactgccctgaccacctgaagcgggtacggcaatgccagcgagcttaggggtaagttcatatactaactgctccgtcattgccgcgggacaaataacgtcgaacttcacaaccggatcagtaactgtggttaaatccgcacatgtctctaattggtaatagtagtcacgcatattagctacaaactgcgggttcgcgtgcgccaacacatggaccgtttgggtgccacacaatgccacttgtaattcaggatacggtgccagggccgctaacacttgctgagttgcttggggactgaacgtcgcagctttgagtcccgcttctcgttgccacagttccgcgccgttaccaccaatcaaccacatttcagggtaagcactaaaggtcgtggctagttccgccgcttggtgaccactggcaatcacaaactgaataccgcgctgctgtagcgccgcatagtcgttggcaaaccgctcctggtcataatcaccatgatcatttaaaaacgtcccatccatatccgttgctattaatttaatcgtcattactaatcatccatttcatgtaagccttttctaccccttagcctaccgattatgcccgcaaagtacaagtcttttctgatactttgttagaaggcaccaccaccggagccaccgccaaagccaccagaactaccgccggagaagcctcctgaaccacccgacgccgaactagcgcttccagaggcatctaaggcgccactaaaactatcgttgattgcaccggacaaatcgaagtccagcccaccattcgcatagaagagtgggtaatacacgagcatccccgtagccaatgcttccgtaccaaaatcaatcgccaattgcttagtcacttgattggctagtccaaaagccgcggcgtatggcaagatttgttcccacaaaatcaaatcaccgacttgggccgtattaaagtgcccaatatccttaagcatgcggcgtagtccattgatttgattacgtaattccaagcctgcgtcagtattgatggcaatccgccgccgttgaattatccagccaatccagaaagccaccgcggccactaccgctggaatcaccatcagggtcacgaccttcggactaactaataacccagcacccgtggcaatcatccccataacactcacgacaactgctgccatcagccattgattacgaagccgataattagtttcgtcttgatagaccgccacgtcttggtctacttcggtctgccagcggctaaaccatttgcccaaccgaccagctttatcacgcttcccgtattttttgagatccgttaacatgaactgcccgtcaaccgcgattttatcaaaacagtgagccaaaaatgagttagtcactggtttcaattgcgttaaccgcacatccggttttcggtgacccgcaaccgtttcaatcgttatttcttgattagctgctgctcgcaaaatctcagccgttaaagcatccgtattcggcgaccgctgtgcccacaatgactcagcaactgctggtgttactggtggcacgtcaaatgaatgattgatgggaatcggctgctgatgtggcttagccggatgacgagccagccaccaaagatagccaatcatgaccaataaccaaccagccaccgcggcaccaaagataacgcgacgcagtaactgattacgtcgccgtttttcattagcttcctgtgccaacttagcttcttgtttttggaccgtcgcttttcgcttggcagtattcgtccgcgtattcgtcgccgtgaccgtggttggaaatagtaggtgactttcaacgaattggttcgcgggattatgtcccaacgtcatcgtcacccggcctgccgcgcgctcaacttttgtctgaccactcaacggtccgtgcgtccaggcttgtaacgcgctcacattcttggcaggtaactgaatcacgattttgacattattcagtggtacatcccagccactaccaatcactttccaattcagttcggccgtgtctgcatagttcgttacgacccctttaagccgataccgatagacaacccgtaacttatcatcttcttgaacttgccggtagagcttgacacgcatccggtcagcattttgggtcaactgatacgtgttgttggcccccgtttcacttggcgccgccgtcaccgtggtcccaccattcagttgcgtcgtgaccccttccaactgggccccctgaatacctttcaaatcttgaacattaaataccccgtgataatcatcatcaaattgataagtcatcgcttgcgttacattcgcactaccatcacgttgaatggctacattgacttgatattggtcaatatcataatccgcagccgcgcgcattgctaagctaaaccaccaacaaaatcctgccaatagtccgagcacgctcagccaacttaatcgtcgcttcttcgacatctcaccatcgccccctccaataatcgttagccctagtttatcatactcccccggtcgtggggcgcgagatactgccaccgctttcttaggcaaagccgtccttttgttgtagcatataaagtgacacgaaaggggttttagtcatgccacaaaccacgttaccgactcacattcaagtgcgaggcgcacacgtcaataatttaaaaaatatcgatatcgacattccactcaacgaatttgttgcgattactggtcgcagtgggtccggtaagtcatcactcgcaatgggcgtcctgtacgctgagggggcccgccgctacttaaacgccctgtcaacctttacccgccgccgaatcaatcaggtcggcaaagccagtgttgattcagtacaatacttaccatctgcattagcgctacgccaacgcccccaggttcccggcgtccgttcaaccgtcggcaccatgtctgaaagcttaaatatcttaaggctagccttctcacgactcagctcagcagtttgccccaatggtcaccgcatgccaccaacgctcgatgtggctgaaaatgatggttacgtcacctgtccgacttgtggcgccaaattcagagcgcccggcgccgaagatttcgccttcaattcaggtggggcctgtccgacttgcggtggcctaggccaagttcgccaaattgacccggcactcattattgcggatgaaaatcaaactatcgaagaaggggccgttgcttcttggcacctacctggacgtaactttatgccgatcgttgcgcgcgaaattgggattcccatcgacattccatataaagaccttagtgaagccgataaagcacgcgtattacatggtcctaagcaaaccgttgccatcaacattccaagcgctaaaggtaaaatctttcacatggacaacgctgtctacgagaacgcctttgccgccgttgaagatagtatggcgacgaccaaaaatgaacgggcaattactcggctgaatcgcttttacaagtttgatacttgtccagattgtcacggatcacgcttcaatcctcagttgtttaactacgaattaaatggtcaaaacattgcgacggttagtgatatgactgtcgccgccttgcatgattttgcggccacgattgtcccgtggctacctactaagatgcatcatcttggacaatcccttgttgatgaattgctactcagcctgcaacccatggaagaacttggactcgactacctcacactcagtcgccccggcgcgaccctgtcaactggtgaattacaacgcattcagcttggacgcactttgcgtagcgccacgactggcgtgttatatgtccttgatgaaccttccgttggacttcatccagctaacgtggcgggcctaatcaaagctttccgcgggctagtcgcccaaggaaattccgtcgtggtggttgaccacgacactagtattatcagtgcagctgatgatgttattgagattggtccgggggctggtaagcacggcggtaccgttgtcggacaaggcactgtcgcagccatcaagcaggacaaagagtccttaattgcgccatttctcaccggtactgccacgctgcgtgaacgccccgtattaaccgacgatgcgctctggaaaaagggggcccttgctattgaagtggctcatcactttaacatccaagacattacggcgcgcattcccaaaaaccgtttcacgaccgtcacgggtatgagcggcgctggtaaaacgactctggtactagatagtttgattccagcactgattgccacagctaaaaagcgaccactcccaacccacgttaaggcctttgacaatggtcacattcggcacgttgttaccgtcgactcagtgcccgttggtaagaatgtacggtcaacggtcgccacttataccaacattctcgaccatctacgccaattattcgccgccaccccagcagcacaagcaaacggttggaccgctagccaattttcatataacgtcgctgcgggtgcttgcccaacttgtggtggtacgggccaaatctctttagatgtgcaatacctgccagacatcaccgaagtctgcccccaatgccacggcaagcgctacaataaacagacgctgaccgtcaaatggcatggctattcgattgcggatattttagatctcgcggttgacgaggcactaccaattttcaaagcgcaatccgccatcgctaatacactccagattctgcatgatatgggactaggctacttactattaggtgaaagtacgccggcactctcgggtggcgaagctcagcgcctgaagctcacctcccgcattggcaaacgccaaacgggaacgctctttgtcttcgatgagccttcagtcggtttgcacccgctcgacattcagcaactcgtcaaagtctttgaccaactgattcagcaaggggcaaccgtcattgccatcgaacacgatctcgacgtaatcgccaacgctgattacgttatcgatatgggacccgcgggcggtatcaacggtggtaacattgtcgccaccggtaccccattagccgttagtcaaaatccaactagtgtaacagggcaatatttgaagacgcatttggccctattccacgtttaaccaatgaactgctgaccgacctcattcatcacaacgctcttatcgaatatttaatccaaaagcgtgtctaacccccagctagttaacttgctaggggttagacacgcttttgttgtgctgcgatggtgccaatgaagcggacgaaacttacgtccttttccttaatgtaccatttcagttagtcagccgtcccaagatgtctttttgagcactgcatttcactaaatccattcgtaagtcatcacaaagctgatagccacatcctaacgccaaattgaaatatcaataacaaaagattaacaattaatcactgccggtgcgccatcactgcccagatcaacgccagcgcactcacaccaatcatcaccgaacacgccgccgtcgcaccaactaagttatataataaaacgatgccgacgctaccaacgggtgccgccaacgtcacaatcgaactgatggtaccaaagaccgtccctgttaagtgcgggtcaatttgtggcatcatgatggcgaacatcttcgggtccagtttgccactcatgaagcccactgcaaacatgcccccaagaatcaagattagttgtggaacgactagtaaaatcacataggtcagcatcggcgctagcatcgctgccagtaacaattgaaacaatgagagccgatcaaaccaagtatttttagtaatgccgcccaatacgcttccggtaacaaagaccacgttgaacattaaaattgcgaccgaatagctcacgggcatgcgggacgccaagtcaataaacattaagttcaaaatcgcatcaatgctcatcgttgcgacgtttaaaatcatcagaatacccagataactgactgcacccattctagtcgtcgtcagcatcactcgctgaatcacgggccaggcctcaatatgtcgtggtcgtccagcaactttgggagtcgactgaatcgctgaacgtccggccaacaagcagctagcggccccaataaaagtcaacgcattcactattccagctaacgcataatcatgccactgggcgataatcaagacccctagtgtttgacccagtggctcaacaagcgtacttatgctcgcattaagccccatcacttgttggcgatcgtcaggatcaatccggtcttgaataacaattgtcaaaatactgccaccatatcgacctagtagatccgaaataaaattaatcgcaacgaccacgtagaaaacaaccaccgtttgctgagtaatcacttgggccaagacgagatataaccccgcttgaacgaccttagtaccaatcagccagttagtttttcggcgcgtctgatcagcgagtcgccccgttaatcccccgaaaacgtacggcacaactgtcaccaccgaaacgatggcaacaaaccaatgtggatttggaaaattctttgcgtacgtgagtaaaatgatattgaacaaactcacccccagcgtcgtaaaaaaatttgcactagcaatcgtttggagggtccgattttttaataaagtcagcattaacccatctcccattaagataatggacttagcttactcgtcattaccgtggtacaatcagcaagtaggttgcatatatgccacattaaggagtgctagatgacaaacatcggagaaactattcatcagattcgattaagtaagggcttaactcaacaagaagtgtatagcggtattatctcgcgctcattcgcctcacgctttgagagtggtgccaacgatattggcgccagtaaactctttgcaattctggataacttagcaatttcagccgacgagttacgattcatacaccaaaactaccagccatcagcatatgaccaggccctttggacaattcgtcacgcttatgaaacgctaaattttcccgccctagccacttggattcgcgaacatcgacacagcccccacgcctacgaacaactcatcgccagttatgccagcatcttgatgctatcctatgaccatcgttcagtcggcgtgacaaccacgacccagcccgcttttgatcacctgctccaagccaagacttggaccctgcaggaactaaaattagtgcccgttctaattccaattattgcatccatcgacggcttggccgcactaacaccactgacaacccgtatggccgccaattgtgccagttatcaaacgggttggggcgatccctttcacgtcagcaacgacttactcgatttttatggatcactatttcaaactaaattgaactttcatgattttcaatccgctcaaaatctgaaaaccaagttcactgccatcgacagtcaccagttaaactgggatgggcggttgagccaacaattctggcttggcatctggaatctctactttggcgactggcaaattggcaaccaattgcttgatgaagtcagcgtcttagaaacacatcatcacccccggattgataatacgttatttgcaattcgtaacgttcgcactaagcaagcccagacttatcgccaatcgcatcagtctcacaagcatctttaacaccgaaagcctgttctagcctggcaataaattacgccggacaggaacaggctttttcttaatcacacatactgattaactggcctaaggcttactgatagctacgcctttcagattgttataattagcgcgtattgtgttggtttatcatttattatgtattacagcggaatacggaaatgaatttataactcatgatggtctgagcttgatcaacgtaaaaagaacttctccaaattagaagaagttctttttgcatgatattaaacaaaccctggcttaaaccgactttgtctggttcaaatgcggtagagccaagaaaatcactaatccaacaacaaataaaatacttaaagaagcagcaccaatcgttgacttccccgtcatttgggtcacgattccaactaggacggggcccatcacggctgagaacttaccgagaatattgtaaaagccgaaaaactcactcccactagtcttaggaatcaaacgaccgaagtacgaccgactaagcgcttgaatcccaccctgactggttccaactagtatggctaaaatccaaaaatccgtcgtactattcaaccgcaacgcgtacaagcagatacctaaataaataataatgccaagcaagatgcccgtccgggtcgacgttttattcgctaaccacccgtaaagcagtgaaaacggaaacgcgactagctgaacaaccagcaagacaatcatcaacgtggtcgtcgtaattcccatatccatcccaatcgaagttgccattgtaaagatcgtgtcgactccatcaatgtagaagaagtacgccaccaagaaccacgccgcagcgcgataattccggatgtgtttcaaagtcgaccatacccgttggaaacttgaacgcaccggatgcgcactgggtgctaacgcgtacttttggtgaacgtttttcaacaaaggaatgtaaaagataatccaccacgcagcggctaagacaaaactccaccgcgcgaccccatagcttgataattgaccaaaaccactggttaattgtaagaccaagaataagataaacgccaagacaccaccgagatagccaaacccataaccatatgacgacaatcgatccatctgatcgtttggtgccacgtcagtcagaaaactgtcataaaacagattaccaccggaataaccgataattgataaaatataaatacctaatagccacttccaggcactagtcggggcaacactcagccctagcgtcatcaccattccgagtatcgaaaagatgttgagcattcgtttcttggcatggggatagtctgctagtgcacctaggacgggcgccaaaatcgaaactagtaaggtcccaatactattggcataaccccagtaagccgttgcattagccggtgtcacaccgctactttgggcaactgccttaaagtaaacgggtagcaccgccgttgtgacaataatgccatagcccgagttggcccaatcgtaaaagatccaaccccactgctgtttattaaatttcattaagttacttcgcgggaacctctgatcgcaatcggaggcggaacgagcattaaccacaatattagtggtgctgatgtccgcccgcttttcctctctctcttttttgtctagtctttgaaaataccatcgaggcaatgtcccggcatggggccatcgaaactcaatccgagtaaccgcgcaaatgtcggcgcttcatcgactaagttagctgcttcaatcgtcccaccagctttaactgctggtccattgaataacagggtcgtttgatagtcaggcttcgtcgggtcatatccatgaaccccgtggtaacggtctggttgaccgagtgtcgctggatggacgggttcaaccacagttggccgtcgactttcatcagtaaaataataaccttcctgggcttcaaccatcaacgcacaagcggggtccgcaccacgacgtgcagccgcctctccagtaatgatggtctcaacaccttcaacctgactaaccaatgccttcaattcatccaactggtcaaattccggtcgcgtataaatgtacgttgagccgtccgccgtcttcgccatcacggaccagtcatcttcaaacgtctgatcttgacgtgcggtcaaccagccctgctgagcgaataacgtatttaaatgaatcatgtgatccacattgatttgatagtgatcacctaaaataacaaagttggtatccgcaaacgtgcccgcagctttagtcgcgtcaatcaactggcccacgtgccggtctagccggtgtaaagctgccatggcctcactggatcgcacaccatagcgatggcgcatactatccatgtcgactaagtgaatcatcgttaggttcggcttcttattcgttaacgtatcgactgcacaagccgtgatgaattcatctagttggggctgcttaatcccattacgaagatgcccatacttatgattcatcgcgagtaagaagagcggtgaactcgccttcaacgagacgagaacttggttcgtccaaatacggttaggaaagatctcggcaaggttatatgtaatcttgctgccagccgtcactggccataaaaaagccgccgttgttagcttcttttgccgtgccaaatcatatagtgttggtacttgaacgtccttttgataccaataccaatctggtgaacggcgtatcggttgtaacttagtattattaacgattccatgcacgctgggatactgtcccgtaataatcgtggtatgtgacggatatgtcagtgttggataaatgcccgtcaccgacttgacccaagtaccaccggtcatcaatccactcagaacgggtaattctgcttgatgttcgcgtaaatcacgaaatcctaacgcatctaaggaaataatgaccaagtgttgatttgttgccatctcaatcgctccttcttacttaataagcttattcgtattattataccgcagaaaattaattggtgtcaggatcgttgacaaaaaacgggcgatcagtgaagcacgactgatcgcccagatttattttcaataattaccagctaacaattcctgttcttgtaaccaccgcaatgctaattgtggccatattgcagcctggtcattcaaatacttgtccttgccaggtttttgcgtcacatgattggctaacgctaacccatgaatcccactaccaaataaatgatacgcagttgcgacctgatgttgtagcatggcctgcacatattttaacgaattgattggcgggaccaactcatccgtcgccgtttgccagacaaagacgggtttactagctggtgtgactaggcgctgggctgcccacaaccgggcatccgtggtaatctgattacgcgccgccgaagtcgtgggaaaccccgctgtcaaatcaatgactggatagcctaaaataatggcagcatgctggccttgataatgatccaaatgataccgtgtgcgcaattctggttgggtcgcaacaccattataagtcgcaaccacgtggccgccagccgaaaacccggcaagaataatccgctgacaatcaacatggtgcgcggacgcctgggtcgtaatccaatcaattgttgcacctaattgctgcaacgcccaaggatagacggactgatctcccacaattaattggtaattcaagaccaccgtatgcattccggcggccatcatccgggttgcaattggcgcttcttcccgcccagaatgataagtaaagccacctcccgggcagataatcatgattggataatcaacagctgtttcaaaatcactaatttggtctaaccaatacgccgtgatctgaaatgggtgtgccgcagtatttaatgtgcgctgttcaacttgcatatgttccccctcctactcccgtattaccgacttgatttcgctttcattatagtaggtcacatgattgcttgtcaatttttattcgaataaatatcgatatttattcgcttgtttactcgctaatgactattatttgctataattaaattaattatatgatgagcgggggtattaaaatggggaaacaaacattcagcgacatctatcacgttttaaaggaccgcattctcacgggacactacagcgttaagatgcgattacccattgaagacgaattaattacagaatttgatagcagtcgctatgctgttcgtaaggcaatcgcacaactagccaaagacggcctagtttacagcgttaaggggcgcggggtggtcttattggagcacacgccacaaacccagcaattcaatctggctttaaataatctcaacggtctgcagagcgtcaacgcggagcgccacctcgattatcagaccgaggtcgtggcctttcagcaacgaatcgttgaccaaccgcttagcacacataccgcttttgaagtgggtattccagtgtatgctattcaacgggttcggatcgtagacggtattcgggcagtgctggacattaactattttaacgcccagcgcactcccactctgactaagaccattgcccaacactcaatttatcaacacttcaaaaaaaatggtctgaaaattgctgtcgttaaaagaatgctacgagtcgaatccgccaacgaactcgacaaagctcagctagcgctcggtgataataattgcgtcggtaatatgattagcatcgcatttaacgatgaaggacgccaggttgaatacactgaatcccactttattccgaacgaatttaacttcaatgaattaattcgtaattaaaccttaccaacattacttagctgaatggtcatccggaccatccagctttttattatggttacttactttagaccaattcagtcggtcaattaaatttatctgtgaataggtttcaacataaattaaaaatatattcgaataaaagttgactaatgtgctgaattatttataataaatatcataaatgctaatgggggttagcatttataccacgtttcactagtggcgcatttggggtcaagagattaggtcggtcatggagtagagagaattgagcgtcactagaccaatttggtttagtgacttttttatgcaaaaaaactgttgattcgcaagattaaacttgccgaatcaacagttgcttcaaaatacaattttaagcttaatactgacgcttccgccggctaaccgctgcagcacctaatactaatgtacttgctaatgcgattcccgctaaactaatcatctgacttggcgcttcatcagtctgtggtaatgcttgccccttagccactgccaacgcgctagccaccttagttcgtagagcttgtaattgcgctactaacgccgtattatgatgcgctttagcttgtgcgattgcccggtcaatcaagttgatcagtgtttcctcatccttaatctgatcgccaaccactgcttctttttgaacttcctcaaacgccgtttccaattcagtcgcagtttcgtccgtgacccagtcagctgtaatttcattgtcgacttcttcttcgatttggtcgacaacttcgtctggcgtcacaccagcttcgatttcatcctcaatatcgtcttcaaattcttcttctgcgtcttcagcttcttcttcgtcctcaatctcgtcaaagtcaggcatttcaacatcgatgcttggatgaactggtttgtcgtactcttcttcttcttcgccattatctggcatttcgatatcaatacttggatgtaccggtttgtcgtattctggttcttcttcttcgccatcgtctggcatctcgatatcgatacttggatgtaccggtttgtcgtattctggttcttccccctcgccgtcatctggcatttcaatgtcgatacttggatgtaccggtttgtcgtattctggctcttcgccctcgccaccatctggtaattcggcatcaatacttggatgtaccggtttctcatagtccggaactggttctggatcattttcattatcaacattatcctgtaaatcccaacgatgggtctccgccttcacgttgactttattagcaatgatgttgccatcaatattttgatttgcatcaatttccgccgctggggctaaaatactgccttgaaatggccggtcgacactaatgacaccagttgctaacttgtcactcgcggttgaatcatagaagttccaaagcaaatggttatcaccaaagtcttcagtttctttattattccgctccgtaccgtcatcataaatgattttgatctgcgagttaacttgatagttggtcgcacctgccgtatcaacattaataatgaccgtattaccatccgcatctgccgatagtcccttgattgtcagcggcgtactcgtgtttaaaacatccgctgacagattgatcacaatgtgtccatccgcatcaggttgcatatccgtcatatcgatgacccgctgattcatatcttcaaaactgtcactcgtataggtggcgttcgcggacgcttcgctaagactagcgctcaatttttccaacttagcaaactctttgtcaaaatcaatatagacgttaccatctttgtcttgataaacttcagaggcaagtaaatggtcgatatagaccccgttgaccatcggccgattaggattcgaaacatcaatctcaatattttcgccaaagataactttattgctccgcgtctcaccagccgaaacaaacgaactcccagcaatattactgatattttgaatatacgaaatatctttatctaataattcttcaataatgttcgtcccaaagttaacgttgcccactaagttttgcaccgcaacgttcccattcgtatgggcatgtagttccgcttcccgtgcaaaaatatggaattgggacgaaaccccgagcatgttatgtagatccggataatcgtccgtcacattaccaccatcggcaacggcatcgtttgcatgggtcacagcttgactaagcgccaccgcgacggtctggggcgttgcagttgtcgtcgactggtctttagttgtcgtcgtttgctgggctacactatcactagtcgtcgtaccggcaatcttagcactagcatcggtagttttagcagccgttgccgcggtatcattgctggtagctgagtcagtagtcgcacctttattagaactggttgttgtccgcgcagccgttgcagtggcagaatcagttgtggtcgacgtctcttttgtcgactctgaaccggttgtcgcattcgtctcttttgccgtctttgaaccagctgtcgtatctgaaccagtttcagtattggcactagttgtctcatccaaattggtggtagcgtttgtatcagtatccgttgccgccttagttccagccactgtgccagcagcagtctttgaattcgaaccatcggtatctaaaaccggctgattttggttagtcacatccgcttcagttgtggccgcagtcttcaaagtttgtgtcttagccgtgactgatttggttgtgcttgaactggttgatgccgtatcagtccccgttgcagtcgttccatcatcagcccgagccaccagcgttgttgtgcccatcgtcaagataacggcacatgcaaacgcccagcgacggccaattttgtacattttaaaattcgtccgttttcgctccatcatttacccacctaaaatatagtttattaactttcctttaattcaattctattttcacgctttttcatacaacattcaactctttatataatttattttgtattgttatataaacagtggatgactgtcaatagacgtgccagcaaccattacaggtcttaactaatcataagttagtatttttgttatctattcgtttacttggaatatcgattatcatcacgcacttattttacacaatgtctcaaacccacaaacagccgcctaaaattggtcaatacttgcctcgcagtacgaaaaattttggtgtgaaagctcgtttaagcaatcacaacagccgcatatccacacaaaaaaagactggtcacaatcaaccagtcttcaataatttaattagtcacgtattgaccaacgacggtcagtcccgttaacactttacgtccatgtggtgatttggtgtcaatgactgcggttaattcttgccccgcaagattaccatgatgcttaccgccagcccatgctgcaacccccgttacatcataaacgacaccatcaaccgccacgtatgcgggttgaccatcctgaccattatattttgctaattcagtttgattaaatgtcgctgaattcatgccgaatcactccttcacaatttaccgtcatgataaactggactgccaagtaaaagcaagtgatccgttcttaaaccaaataattgacctatcttgaacataacgcgacatcaaacgatcgccgaagtagttatacccccacaaccatctcggtaataccggcctaacctttgaccgacgaaacttaattgactaggtaaccatacttacgttagcacccaattaatcgtacccgtgatagcagttgtgcttataagtctgccaaaacttaatcgctgaccaattactgctacccacaactacttaatcttaataccttataacatcagcgacgccgtacctcctagtacggcgaccttgtgaaccagtactgttcatgtgtccagtactgcccctaactgcgttattaaaacgcacacctcagccactactgcccattcaatgggctgcgtcgaagcgtgacgtctagacacaccccgtatctaggacgtcgattgcttattgtcaaacaattaattaccttggggtggcccgatcgttgcgacccgatgattaccagccatactggtcgtaatacctgagataacagttcccatcggatcgacttgattacttgctgccagcaaccgttctcgaacacgaacaaccgcatgtctaatcgtcaataccaccgtcgttttaactggttggagccgttgtgtcagtagtgaaatcacttcaaccaacatctgcccagcaaccacccagtcacccggtttaacgttgaacttaaatgtaggcgattccaaagcactggttaattgaccaatccgtagccagcccaccagaccgtcggccgctcgaaagccaattaaccgttgattggctgccacggctgtgataaccccagcaaagggcgcaacaatttgatccgttgccggtataatttgctgcttaaatcctagtaacccatataagtgaaccgtatttgcaagggtcgtcacattgatcacttggcgtttaaccggcgcaactacgggaattaatgagctaatgaccactggcacacttctcacttccttactttataaattggcaaccattcgtatttaaataaccttaacaaacgtaacgtaaaaaacttgttttctttaatatgtaagtcaattagtttaagtcattgactgttatctttacaacataaaccataccataattaaactagaataccagcataattaacggtttcgattaaggtttacatctgttagcgttaattcgtaaactcaattaacgaacgatgctactaaatagctgaaattggccaccataaccccaatgtcgcactcaatcaatcttgtagatttgacatcatgtttccccaatacgtcaatcaggcaatgacggttaggcctacaatttcagtcagaccgattgcgagcaaaaaagagcttccggcttttattccgggagctcaaccagtcaacgttatttatttttaatctcagccactattcaaccgtaacacgcatccgcccgtgccgctttgaaaaatagaggttctgatcaacacggttgtacaaatcaatcggactaccatcggcttgatgcagtgtcgagacaccaaccgaaatcgacacattgatttcctcgtcttcatacttaacaacgagatgattgactgcttcaaagacctgacggacaatcactttggtactagccagatcataaccgggaaacaggacattgaattcttcaccaccggtgcgatacagcttgaccttctcgtcattggcggccaagaccgttgtgaccgtggcggcaacttcttgcaaaacgtggtcccctgcaaggtacccgtacgtgtcattaacgtgcttaaagtgatcaatatcgaacatcatcatcgataagttgagattgttcttggcactatcatcgaataaatatttgatatgttccgtgtaagcggcaaagttctcagtctcagtcaaagcgtcgtgactcgcaaactgggccaaccgtaatttaatctcactatcttgggtcagcatattaacgtaggcgtacaataatcctgcaaaaatcattaagtagccatattcttgtaaagtattgtcccaatccagcgaatatttaagcttgatcaggccccacaagattccgccgtaaaaagcgaccgcgccatagtaatatagccaaggataccgatgcttaggtacccacagccgtagataattcatgctccagaaaaatagcacgaacacgacggcgtaactccacgattcccagtaaaaaatcgactggtcgaaaaccatgtacactatgaccacaggtaacaatgaataatacggcattcgaatattcaaaaaaaacgagcagaacacgacggcaatcaagtgaaagttaacaaactcccaactatctgctttaccgacgaccgacagttgcatgacaaacacaaagaccaacatataaatcacaccgtgccaagcattgacggtatcatcgtcaatgttaatgtgacgggcatgaaaccacgtcgtaatccaattaaagaggacccagtaaagtgttagaacacctagtataaagaaaatactcgttacgaacggcgaaattcgccaattagaccatgtcatcgtaaggatcctttctcagcatccgccgttgaccaattgccgaccatcatcgactaaccgcggtttcccataatagtaaccctggtgccattcaataccttgttgttcagccatcttttgatcaccctggtcttcgacaccttccagaataaattccagatggtaagactgagcaatatcacgccaaaatgctaattcatgaggaatgcgctccgcttgcccactcatccgtaagttttgcatcgcaaacttgatttgatcaacaaacggtagtgcgtggcgaatattctcaaacgtgttcgagcccgtccccacgtcatcaatgcttaatttaatatcatgttggtggaaaaagagactatatttttgaatctcgtttaatgaaggacattctgtcaactcaatcgtcagcgcggccggattcaaccttttttttaggtaaatgatcgtccctaacatcaggtcgtcctcagcttgttgccggtttaaattaagggctaacacctgattagtcgctttcgtctgcaattgactagcaagttgttctaataattcagcttgcttatctaatgataattcagtgaacgacttcggaacggcccagtgaccattcatctctttacgtaacagtaattcataaccaaaaacagctcgatggctgtgatcaacttggggttgaacaaaaaaacgatacattcatgaagcctcgcttttaatgatttctttatgtcaatataaattgacaactcctgtaaagtataaccgcttttaactaaaatatcgagacatagttacagactttaattaaaaaaattattaagggttatatgtaaccgttatattgaccgtaacaaaaaagaacgtcgtgacgacctcgtcataacgctctttttaccagtcttaatttcacttaaccaacttatcccagatgacgactttaccagctgttagcgacttaggaacgtcgataatacgttgattggaactaccccgaaattgtagcgagagatccatcttatcttgtaaaaagcgcccatctaccaagatatcaattaatgatagcatcttcagtttatcctcagagtcttgttgcaattcttcccaagtataacctgaccacgaccaaatatccttcgtgtttccaaattcggagcgaatgcgttcacaaatccgaatgccgacttgagtatttagaaacggttcaccacctagcaacgtcaacccttgcacataatcttgcccaaggtcttcaataatctgatcttccaattcttgtgaatacggttgtccataatgaaaattttgtgccgccacattataacagcctggacagtggaatgggcagccgctcaagtacaagctacagcggaccccttccccatcaacaaagttaaatgccttataatcagcaacatattgttcacttaagtcctctgccagccattctttgggcatcggattgtttggtcctttcgtagcgcgcggcattcttaatcatctccggagacatatttttagcacgggacgcgatttcaacgtggcgaccatgtaccattggtcgttgttgtgggttacctagatacccacacgtccgcttaacaacatcacagtatttagggtcgtgattgccacattctggacagacgaacccacgggcagtggccttgaactcacccttaaacccacacttaaaacactggtcgatcgacgtattcgttcccaaatagccgacatgatcataggcccagtcccagacggcctccaaggctttaggattctgagtcaaattaggatattcacaataatgaataaagccgcctgacgcatattgtggaaaacgttcctccaaagttaatttatcgaagggcgtcgggtgcttacggacatcataatgaaaactattcgtgtaatattccttatccgtaatatctgcgatccggccaaacttcgcaatatcgtcacgacagaacgtatccgtcaacgattcagccggcgttgaatacagactataatgatagccactttcagccgcccactgcgcacacttatcccgtaacgctttcaccacggtctccgcaaaagctaacgcgtgctcgtcttgttcccagttcggaccaaagaaggtcgtgcagacttcataaattccaatgtatcccagtgaaatagtcgcccgctgatttttgaagagctcatcgacattaccacctgctggtagccgcttaccaaacgccccatacatgtataagagtggtgcattttccggcttagcttccttcgttcgttcgatacggtacgcgagtgcttcatgacaagtcgccatccgttcctcgaagatttcccagaacaactgttggtccccatgtgcggctaacgcgattcgtggcaggttgactgtcaccacgcccaaattcatccggcccgagtttacctcgacaccattttcatcacgccaaccttgtaagaaggaccggcaccccatcggcgtcttaaaactccccgttaattccttgatcttgtcatacattaaaaggtcgggatacatccgcttggtcgaacactcaatcgcgagcattttaatatcataattgggatcattcggacttaaatttaacccccgcttcatcgtgaagatcaatttaggaaaaatcgcagttcggtgctccttaccgagtcccttgattcgaatctggagaatcgccttttgaatttctcgttcaatccaactagttcctagaccaaaattgaccgtggtaaacggcgtctggccctgtgacgaatataacgtattgatttcatactcaagggcttgcatcgcgtcatagatatcttttttagttttggctttcgcataagcttcccgctgatcggcagggacccactttttcgcatcagtcatatgtttttgatagttgattgccgcatagggagccaataattggtcgacccggttagcggaacagccaccatactgtaatgaagccacgttggcaatgatctgcgccatttgcgctgtggccgtttgaatcgaccggggtgaggcaacttcggcgttcccaatcttatacccatttttgaacatgccgtcaaaatcaatcaagcaacagttcgtttcaggcgtgactggtgaataatcgagatcatgccaatggatatcgccacgcagatgcgccttagccacgacatctggtagcatcttcaagcccatggcgcgacttgcagcaccggcttctaagtcgcgttgcgtgttaaaaatcgtactatccttatttgcattttcatgcacaacgctggcatcgcgctcaaacaacttttcaatccgtccttgaacattagttgctgccgcaaaccgctgctgttcagcttcaaagtaatcctgatatgccttagctgccgcggtcaggccttgcgcattcaaaatctgcatcatggtactacgtagctcccgagtatcaatgttgtcagcatcttgatactgggcaacaaaggcctgcttgacaacccgtacctcgtcatcagtcgctaacaaccgtcgtaagacaaagtcaattttatacggatgaaatttcgtttgtgcgccaccccgctttgtgacggtcagtggccgtaattggtctaatatatcgttagttgtcgttgttagcatcttaattccccacttttcaaagtcattgattgaatacaattgatagtgcgttctgtttgaatcaatactatatatagtagctcatttccattaacttgcccattgccaaaattaactgtcaccttcagttgtgtacaccaaatcgctttaatcgtccggttagtgcgtctttggaatatttaaaaaatattttttatactgttttttatctaatatcagaatatttaatcaatctcgttaactaccgaaccaaccttgatacggcttgctttcaatatttttcacacgccataaaccgaattttaattcgttaaaaattaagctgaacacaaccaagttgttgtaaactgattaacttatgactattttgtttaactcatgcggcggattcgctataatgaaattaagtcctcattgagggatgtggacattggaggagagaataattatgcaaaaaagcaggggaataatcgttggcttgttgttgacagggctactgacaggatgccattctgccactgacacacaaacgcccaccgttcaaccagcaacatcaaaagtcagcgccgttcgctcagtcacgactcgggatttcttaggtcgctgggtcagcgctagaccagcaatgagtctgtacctcagtaccaatcatcaagttgcttggttccgacgcggacatacgcccattcgtagtcgcgcaacgttaacgttaagtgatacacgtgccacgttcacaatcgatcacaatgttgcaaaactgaccctcaacgacgctaatcaaatgaccatgaattatcaagggactaatatcgcactgattaaagatccaaattggcagcctgaacacaaccaggttcccaccacaactaatgacgccttaaaggcgggcaccttaacgccaacatttaaattgtcgtactaattgaaggccacaccacatttgcacgttgacttgtgtgagtgtggtgtgttttttagggcctgacaactagcgaacggcttgcttctgtcaaccgtgctctctataattaaattaatatgactaatcaatggaggaacatcaaatgattcgaccaattgtgcatgatcccgccgcgcttagtgtccctgctgacttagcaacccctgcagacactcaagtcttgactgatttactggataccctcgccgcacacaccgataattgcgttggaatggccgcgaatatgattggggtcaacaaacaaattattgtcgtgcaactcggtccctttgcaattgcaatgatcaatccgaagatcattgatcatcacggcacttacgagactaaggaaggctgcctgtccttacctggtgaacgtccgactagccgctatcaccaaatcacggtgaaatataaagatcaacactttaaaccgcaacaacaacgattcaacgacttcacagcacaaattattcaacacgaattagatcactgtgcagggaaactgatttaattgtgcctacttctaactgagcgggaataaatattcagtttgctgaacttgttgacatttatgaaagataggactggttttatgacaactttagcttataatggcgagacagcaattcctgcactcgctcagcagcgtcgacaccaagctcatcacgcgctcggtaccgacattgatttgaccctttttggtagtgatagtgaccagtacctacaagctgcttgcgatcttatcgaccaatatgaagaccgcttgactgtcaaccggactgtttctgaggtcatggcaatcaaccaggcggcgggccaacaccccgttcaagtgagcgccgccacctatacactcgttcggcaagctgtcgaactcagtcgacaacattttggtttcaatgcgttgattggtccgctcgtgaaactctggcacattggttttactaacgcgcacgtccctgaacagtctgcaattaacgaacgattggccttgatcgaccccgaagccgtcatttgtaatgacgctgatttcagtgtgcttctcaaggtcacgggaatggagctggatctaggcgcaattgccaagggctacattgccgaccgcattcaagattactgggaagcatttggacagcgggccggaatgatcaacctaggtggtaatctgttaatggtggggacgtccccacttcatccgggtgggcaatggcgcgttggtatccaagatcccaccactgaccgcggtaacgcgattgccagcgttacgattggcccctgctcggccgtgaccagcggtatttacgagcggcaccttgaatttaacggccagtcctaccaccacatcttagattcgcaaacgggttatccccgacaaaacgaccttgaaagtgtcaccgttttctcgaaagcttccattgatggtgaaatcgaaacgacgcggctcttctttgcgggccaaccgattcccgattgggcaactcagcgacccgatatttacggcgccatttttgtgactaaacaacgtgagcttcaaatcgttggcttatcacctgaacaagttaccttactcgatgaccggtttacaataatttagaccacaaaataagctaggtcctccaagaaattaacttcttgaaggacctagcttattttatggtccacttacaggctagcatttaatttgcagttgactttagatgcggtacgttcgacattaaaaccattttaatcaagcacagctaaatggcaaaaatatagccgttttagttaaaataacgcgacctaatccgctggtagcttagcctctaagcaatcaataatcgcacggacatcatccgttgtcttcgtctgcattaattcattgcgcaattcggccgcatgacgcataccgcgaacataaatcttaaagaagcgttgaagcggtgcgaaatgcccttgtagacctaagccaataaattgatcatacagatctacttgataccgtaacaattctagcatgtcacgcgttgaatgaggctggggaatcggttcaaaagcgtatgggttctgaaaaataccgcggccaatcatgataccatcgactcctggatgggctttggcaagcttcagaccagcctgataatccaggatatccccgttaatttgtaatagcgtcgctggtgccaaagtatcacgcatttgaactaaattatcaattaactcataatgcgctggtaccttgctcatctccatcttcgtgcgcacgtgaaccgttaacacgggaacctgctgttgcaacaaaaatggaatccaagtctcgtactcatgcacatcgtcaaagcccaaccgcgtcttaacactaacgggaagctctgcttgacgtgcgccctcaatcacttctttggcacgatcaaaatgtcggattaaatcactaccactatgatttttaatgaccgccatatctgggcagcccatattaagatcaatggcttgataaccttgattcttcacttcatgggccgctttcgtaaagtcctcaccactattgccccaaagttgaacgattggtcggggcgactcggcctcatcaacatatagtcgtccccgcgttgtaaacttagccttcgggtgagtaatgcttaacgcattcgtaaattcagtataaaagacatcgggggccgcagcgcgcatcacgacccggcgaaaaacggagccggtcacggcttccatcggtgctaaactaaaaaacggtcgctgggcggcctgagctttggccgcgatccgttgccaatatggcgactgcgtcatagttattcattcccttctagataataatcacttatccataatagcggtgttccacgttgaagcgcaagtattttggcggccgcactaacataattcgccaatcacaagccaaaataaaagtccggcgttaaccggactcgcaataatagctaagttgataagtttaattgtcgctttaacgaattaaaaccagtgcccacagcaatagtccaataacgagtaccaagtttaacaattccatccgcaaatcagcgaacttcagtgagctgaatgagataccggcagttgtatccatatatcggaagaaaatcccacttaaaactaaaccaactaacaatacaaatagaaccatcattcccgtcatcatcatcacaaactcaactccttatttagtaaaattcttgggctctttgaaaccatgtttatagtagtccagcagctactttcaagcaagtatttccggccgaaaaactggcgttcttagcatattattattaactaaacgataccaatcattcccagcaaaaaggttctttcaggaacaactaaaactccgaaagaacttttttaaatcgccattaattccgccgtcaacttagtcgctcagactaaagtaaccgattggactagtcttgcacttcgaaataatcattgagaaatcgaattgtgcccacacacttgttaattaatcagttgttttatggcgccgttgttgcttgctaaaaccaaataagctagttgcggccaataatacgaagcccaatacggtcaaaactcgattggtttgttcaccagtctgtggtaacgtggccgttttagttgcggtcgttggcaccgtctgctgggtcactggcttagccattgccggactcgtcgtcgtccgcaataccgttgtggcttgtcgtggctgcgtcgtaacaacccgctgcgttgttgggacggaagctgaacttgactgattaagagtgggcttggccggggtcgcttgtggtgccgccgactgattagtgctggttgacgtgccagttgaatgactaacgactggtcgttcgcccacaggtttttcagtcattggcttttcggccgctgctgttaaggttgccaaggtccgggcgcgcacggtcgttaatccagcttgagcttgggacaattcccgctgtgcagtaacgacctgatcttgagtacccgcaacgcgctgcaacttagctgtcaccgctgctttcgcctgattaactgctgcttggggctgaacaatatcataatctctttgtgccatttggaagtcgcggctcgtgccactgacttcaattttggcgttggctaattcttcttctgccatcatcacgtgctcattagtcttatcaaggttagcttgtgccgctgttaacgtctcttgcaccgttttcagctttgcctgagtagtttgtaacgtgactttgttggccgcactgttatccttatcgaagttgctctgggctacttgaacagcagcttgtgacttagtcactgccgcttgcgccgtcgttaccgcagtttggcttgtctttttagttgccaattgttcatcaagtgctttcgttgccttgacgtgccggtcagtggctgcttgcttaagtacgcccatatgcgtctgaatcttttgattcttggctaacgttttgttggcagcgtctaacgtggtttgcgccgcttgcagatcactcatagccgttttgactgccgtagtagccatggttaatgcttgcaccgcttgcgttacctggtagtgggccgccttaacagctgggttattttcgacctgacttgctaaactgaccgtgccattcatccttactgcctgaccggttcgagtgttagattcggctgcatgtaccgtcattttctgggccatgatgccccctgttaacatggtgattcccatcactatcttaagcgcttttgacatactaaactaatccccttttaaaaagtattgcccagccatgaccagcatgatgatcaatatgaaactgctggaactatttcattttgccggattcaatttcaaaagcaaggaaagttagtgattcagcgtatttgtaatcaccaaccactcaacaactttcatccacatcaccaaaataattatatctagatgtcattactgcctccctcaacacgagtccccatccacaattaaacggtaacgaataatcatcaccgctaacaaatgttaacccgcaccatgatttcattagtgacccattctcaataaaaaaaataactaatatttcgattaccgtagcggcctcacaatattgatactaatttataccgttacttaattaggtgggccccgccatcggtgttagaatagaatttaacctaaagaaaagtgtgactgctatgaccattaatgacctccaagcattcgtgatggtgtacgatttacgccacatttctaacgctgccgtagaactccacttatcacaatcggaattgtccaaacgaatgcgagcccttgagaacgaactgaacattaaactactagatacacacaacaagcgccgtctacaaatcacgccagctggtgaaacgttctatcatcatgcgcataaaatgattacagactatgagaccatgatgcacgatttggcaccgaatcggccaacgacatttgccaagctcatcattggcgccattccaatctcaggtcaatataacattgccaaaaagatcgccacttttgatactcagcatcctgatactgaaatcaaaatcatcgaggatgagggcgaccaaatcgtcaaacggttactgagtggtgagctacaagcggccatcattcgcgatactcagacgacccaattgcaacccaccgaatttcaaaaacaaccactactcgctgacgaactcaaaattattttaccgcgtgatcaccccctagctacccagccagtcattcggattcaagacttagcgcggcagaaaattgcaacgttaccaccgggctccggtgtttacgaaccgatcaacgcactctttgctcagcaaggcatgacgccccaattcttctttgaaagtacgcatattgaaacgctcctgggcattctcaatcaaaataacgtgactttcttatttaaacaatcggtacttccgttcatgactgaacacgtggtcatgcgctcactcgccatcccgttcatcagtcaactgaactttgtatatccccagcgaacggggaaccagttactcaccgacttaattgactacttgacggtgactgcccaggaaaatcaacaagtttaaaaaatacccttttcatccgaccaaccggccgtttgaaaagggtattttttaaacttatccgcttatgccaacccaacgaggtggaaccagaacatctcaactaacgcaacgacaaagacaaccgccgtcagtgggattcctaaccgcatcacgtctttttgtgtgtaacccccaccagtatcggggtcgcttccaactaagacagcgaggttgtggaacggtaaaatataatgcaagtttgtcaccgagaagactagtaacgatacggccaagggtgaaattcccatatgagccgtggccgctacgaaggccggaatcgtaatccccatcaccgcaatgacagaacccatgaacatgtggataatcatggcaaaaacagtaatcacaatcgctaataaataaatattagttggcaagttgcttggaatcaaggtcttcgcaatccaattattcatgccagtcacaccaccgacattcccgattgcgattgccgaagtcaagaacacgagcacgttcacgggaacaccttcccatgatttggccgttaagatcccgccaactactgggagactcatcatcagcgcaacgatcaatgtcaaccaaccaacgtccaacccggtgatcccactcgttaaccagagtgcaatcgcaatgatcagccaaataattgttcgaatttccttccccgtcataccacccaactgggcttgttgttgcttcaacgcttccacatcgatgtggacttcctgactaggtttgaagaggaataagaacagaaacatggttaagatggccgcaatgatcatgggcacgcccatgtagataaagtaagagacaaagttgacgctctgaccagaggcctgtactgccaacggatttagtgacgtatcaccagtataaaagaccccggatagcggacaggacgcagcaaagacagcgaggcctagcttagccaaatcgcgtttgggcatcttcgccgtttccgcgaccaccgtaatgacggacataatcatgaacgcccgaggccatggatggggaatcaggagtgcgaggataaaagtcagggcaaaaatcgaaatcacaatccccttccaactccgcacaaacttgataatgaatgcgtacgcgatgcgttgacccaaaccagattcattaactgcccccgcaatcaagtacgccccaattacgagccacataattgaaccagtccacgccgacgaaaagacctgtgacggtgtcgccacgttcataataatgagcaacattaagtaaatcccaccaacgaacgcgggttgcgcgatttgggtggcccaccagacgaccgtcatcaaactaagtgccaagtccatctgccccttagctgacaagccggcaatcggcaagaagtaaataatggcaaatacggcgattccgctgaaaaagccaatcgttttcttgttcacgagctacatgctcccttcaattttgacagcaaaaagccccccgaccagcacacttccgttggtctggcggctctttgtaagattaaattttggttcaatgcgataaaaatacgctcatcaagtgcaatggatgacgttacttcaaatacttctcccagtcagccactttcatgaattgggcccgttcaaattggtccttcatatcgaatggtacggtgccatcaatcactagtttagaactcatcccacggaaacgaatcgactttggatcatattgtgggcgttccgatgggtccaacggatgattccgcatgcctgataagaccatcaagtcctgatcggcttggaaacgggtattcatcgtccaaatcacatcattcatatcaaaaatatcaacatcttcatcaaccaggataacagtcttcaattccttaaaggctgagaacgcaagcaaggcagcttgccgttgaattccttcatccgcttcattatccttgtgaatctgcatgatggtcatcaacttaccaccaccagccggcggattataaacattcgtcactttaccaggaatggcacggttaaccaattgtaagatactagcttcagttggaattcccgccatgctgacatgttcttcggatggtccaatcacgctttgcatgatggcattcttccgatgagtcaccgccgtcaccttaatcacttgcaaggctggattagcatcaccatcataacccgggaattcaggcatcgctttacccgtatgcgtattgatatcttcctgaatacgttcgttaggcataatgtacccctcaagcgtatattcagaacgcgcaatcgccttttcatcgacggtcaccccgtcaactaattgaacagcttggttccgaatcgcaccagcaacacctaattcgttatagccgaatggcgtggtcggtggttcgaaagttgcaccaatcgtaatggctggatccaaaccaatattaattgtaattggcattggcttgttagctttctcatactcttccgcaaacgcaccaatgtgccgaccgccaggcatgatataaatccctaacttatccttatcttcaaggaccattcggtgaatcgtcacatcactcttagacttgtccatgcttgagccaaacaccacaccgaccgtaatatatggtccagcatcttggggcgtattcgttggtgctgccactaacttacgaatatcaaagccttcatccgtcgctttataaacgacatcgtgagctggcgcatccgcttcagcaaccgtttctggcgccactggattagagactgcttcgttcaagtattgccctaacgtctgataatcgtggtggaacatcttaccaacgcgccggcgactcgccatcaatccagtcaagacccgcgtatcaggaaaccccttaacgttgttaaacatcattgctggaccctcttgcgttggccgttgaacggtcccaccagcaccgatataccgataaacaccagaaagttccgcatttggatcaacttcgacgtcagtttcatgatagttctttggatcatccttgatctcatcaagcacgcgacgcaaatcccatggttgttctgccatttcattcatctcccttaaagtttacaagaccatcatacggccactcgtaagcgggttcaattcggattgcgcagatatgttattcgtgaatggaataatacaactaaacgcattaggtcgatgattgttatgtattaattatgattgaaacgtgctgatttccaaagtcaaaagcagccagcttaggcccgctggaaaaagttcgagttagcgtaaaattgcttagttggcgcgtcttacgccgacttccaggcatttcttccaattgctggaacgcggtggacacagatttaagccgcagaccacgtcttaaatactggtcttccacgctttaatgccatattggtgaaacgccttccagtcgggacagtgttcgaatggcggacatgtgcgtacccaacttttggtgaattcgtcattgtttttcataaacaataactttgtcaatcaactgtcagggtgaaaatgatattgagatagctcactaatcctgaattggtgtagtgcgatttaagctcttgacagagggcttaatacacctaacgctttgtttaatcaaaatagccaacgacaaattgtaccgagttcggtggtcgttcattagccattcgagcgacttcccgaccggaggggctgggtggacaatgctcagtagccaaattattcttagtcggaagtggggtacttccggcttagaataagactcgtatttgagatgacgcgggttgggcgttagctcaaatcgacgtcggctacgttccagcaattgtcacccagccccggaggtcggaataggacgcgcaccggctgacgaataacaatctaaacttggcacgtttcaatcataattcatgactaacgaaccggcacagcatttagccgagtcgtatttttaatgcgtgacatgtcgtttattgtgcaaactggggcattactaaataaatacgccgtgtaaacattgataaacagtttaatcatgtttatactttaaaatatgttaataatttttagactttcttaagttattaacgatgattagtcattaatagccttattcatcgattagcacttattattcatattcaagtgacacgtcttattcagaattttaactcgattgatagtagcggctatttactgtgaagactccagtaaatagttttttattgtcgactaatcaatctatttttggaggagcatcggggaatgtataaacagcaccaattttttaaagccgctgacgatcgtcgcggccaagcatcgttttgtcctaactgtgggcaagcggtggccgcaacggatgaattttgtcctaattgcggttttaagttgcacgcaaccactgatcagccatcgccatcagtaaacaccgcgcagtcaacaacaagttcgacgcgcaaggttcgacaacaaacccaacgccatatgccaacttggggttggggtctgattgccgttatcgttgtcattctgattggcggctatctgtatggacagaattattatcagccgctcaatcagctcgaccgtgacttaaccgcactcaagactggaaaaggtttagcgaagcaagtaactagcactgacccatcactcaagattacaaatgatagcgtcaagccgatggtcacttactttaaaaacaatcgaaaatcattagcatcactggctagttcgcttaaaagtcgttctgcgactaatgattacggtattcagttcgttaaaaccggtaaatcctggttgtttttcgataagtatcaactacaagtcacttctgtttatgccacactggcgacgaaccaccgtaacgttgcactcagcgttaatggtaagcacgtcgcaacatctaataaagcaacttacgagcataaaatcgggccgtatgttcctggttcatacaccttgactgccaagggaacggttagcggccatcagattaccaataagggcacctattacctccgggcaaacggccaaacttacgacttggatttacgtacaatttccttcaccgttaatggtacaccgaataccaccgtttatatcaatggcgaaaatgaaggaacgattaacagcagtggcacactggcgctgaatgatattccctggtctaatcgcatgatgttgactggtaaatacaaagccggttcacaaacattgaccgccaaacaaactaacgttagtgacgctgagggtcaagacgtggacctcaaatttgccggtgtgatgagtaaagatactgcctcggactacctgaacggtatcttcaccgctgtcagcagttatacgtccaccggtgacctatcggatgcttcggattacgatgaccgcactttggacgactacttcgtcaacggtaccgataacacggactacaaagaactggtccaaatggcgaagggctactacgacaatgatgacgtcctcgatgtcacctatgagccgactgtcttatcaacggttccagcagctaaacaacaaagccagatcacttatgacgtcaaatatgactttaccaactctgaagatgaacgcattcaggtctttcgttacaccgcgacggtcgagaaaaccggagggcactacaagattgttaaaatcacgccggcccaaaaaattcggtcgtacactaaatccgatgattctgatgattaatgaaggagaatttaacttatgaaaaaatgtcccaactgcggcactgagattgctgccaatgcaaagttctgtacccactgtggttacgatctaaccaaagcgacaccggcctcagcaacggccaacgccacttcagccacagctacccaaacaacgactgcaacgacgcaagcagctgtccataccagcacagcttcagccaatcaacaacaatcggccagcgctgaaaaacaaacagcatcacgttcagtagcagctgctgatacgacacggacggctactaaccaacaagtccaacagctgcaatcatctgctaagaattattttagttggctcttggctagctggaaaaatcctagctgtgaagtccgaactgaaagttattttagttacatttcctttgtcattgaagcactattcatgacgttggccgctgtaaccattagcaataagtttctgaccactgccaatgacagtcaaagctatttccacattagtaaattagctttttccaccgacttaaagattttcttatgtctcctaatcggcatgtgcttctacctggctgtcggctatgtcacttgcttacttggaagtcgtgggaccaaagtcggctttacgacctatatgaaacgcttcggtcagttaaccaattacgcaattattgtgaacctattattatggtttgcttcgtccctagttaacttcagtgttgataacttctttaccattgcggctagcttcagatggtcgattatcctgttgagtgtcagtgtccttgtctggcaattaggtttgatcttcgtcattaacaagtcggtgacccaaccattaattagccgcgtctacctagcccttattgcggttctagtcgttagcctgctgttctactttatggataaaattattctgcaggatttacagactgcacttctcagtcacgcaactgactttgccaatcaaattggtaacttgttcggtagtcaatactagttgttcgaaggtatcacaaataaagcctcgtaaattaacgcttatgataatgcgttaatttacgaggctttttatattcattagattgagcaaattaatttgtaaccgataacagggtgctactcgaatagtgtccgcttgagctgacggctaacaccgtaacccaccagaataatcgttattaaccatccggccgtcactagtgctttcccgattgcgatgattcggcgcatcgtcccacctccaaaatgagtcgctggttcagccattacgcactcaaccgatgactgaccgatagtaactcactaaccaataagttttcagttggcgtcaagcgcaactgtttagtaaaaatattataagtcacgtcattcgttaaccgcttaattagcgcatgatcaagctggggcgcctgtttcaattgttggtgtgccttcaatagtgctgcccgaatttcttgattcgccgcagttggtgctaattcttgatataaatcttgaatgattccctgtacttcacttttcacgttgcacaccttactttcagaaaactaactactcttagtataggcgtcttccggtaaaagattaaggttattttcattgaacattaaactaatttgtcagcaccgcctttaaactcaccaacgttaactaacctaacattatattaactggcgtaagtcatcatttaaacgcggccagtgctaattggatcgcggtagcgcgcacatcgccgctaaagcgatggtcaccgtcctgaacccaatgcaactgactgtgctgatagacctcatgatacttttcagaagcctgtggcgagaccaccgtgtcggccgtaccgtgaatcaatgtcaccgaaccggaatactgctgagctacctcataaatcggcaactgttgcgcggtccgcaaataaaagccaccaactttaaggccatcacgaatattcaaataggccggaatatgttgtggatcataggtcgcaccttgcagaacaccttgttgcgcatcggactttaacgttgcggccggcgccatcaagatcagtttgtcgaccacgtctggataatatcctgctaacatgctggctaccaccccgccttgcgaatgccctgccaagacaatgtggtcataatgtaaggtcaacgcttcatctaaaactgctttagcgtccgcaatctcattaatcactgtcatatcttgaaaccgaccttcactacggccatgaccattgaagtcaaaacgcagaactgccaagccgtgagcaactaatgcctgcgccaattgcggcacaaattgggtcgtatcatatcccatatcggccgtaaacccatgcattaagatgactagcgttgagctcggtgccgccggagtctccaaccttgcctgtaacgccaacccatcccgtttaatcttaaattccatcgatgtcatctcacttattcattattcacacctttaatatagtggatttacgtcccatttcatagtcctgagcactcaccctatcctgaacaaacagctaacactatacaaaaaacctgtttccatggccttcacatcagtcatagaaacaggctcttaatatcggctggacatcaaacgatttccaactgtagctgctgcgattcgacccactttgccgcaactagaatgcggtacagcacgattgaaataactgctggcatcagcaccccagtcaagagatagaccataaaactgttaaagttcgtcgatgctaacgaaatcggtgcaattaacgaattcaatcctaagccggccagcttgtaactggttgaaaaatgaaaggcaatcgtcgctaccggggcggcaataaccgcagcaaccattggtggaatcgctaaccgtggattcaccagcaagtttggaaattggactttaggcgtgataatcccctgcgcgatattggcccccaagttattttggcgaaaagacataatcgtaaagcccacgaactgggcggttgttccaattaaggccgcacccgatgagacgggatctaacatgaccgccaccgccaatgcggccgaagacgcaggtgtcattaaaaataacgcccaggcaagtgaaacggccatcgaaccgatcaacgggttgaccttcattgaagtcgcgatgaacttgctcagccagaccaacgcgggcgtcgttacggctgctaacccgagaccaaccaccgcaccgacaaaagtggccgctaacgggaccaacatcatatcaagcggcgtcttaccagttaaataattaccgatcagaaccgcgactaacccagccgcaacggccgaaatcggttgaccggtggtaaaaatcgagctctgagctgcttgggccaacgtatgccccgtcgctgtgacgccgttagttgcggactgagagaaaaagacagcgttcgccccgatcgtcgacgaaatcatggcgctaaacgtaactaatgtgttgctgttgagcatcgtggcaatcgcgactccaaatgccggtcccaataacacttgcgcaatcgcaccgacttggtataatgccgtccagtgaacaaaattcgcgagtgactgcaataacaatccaatccctaaacaaactaaaatagcattagaaacacctgccgaaactttataaacgtaatccatggtactcatcttatgtgtcgcggtagccgcggtcgtagttgcttccatatgtaggcctccatttaaattaataagaatatgattagataaaaatgagaatagctacatttaaccacgtgttttgaaaattgtcaacgtattttcatcacattatcgttgccaactaaacgaaaagaccagccaggcacgatgccctcgctggtcgctttcactcatcgtattcaaatcattggcacaagccatcaatccaggaaaataaatcgcctaaatcatagtcaccactgtggggaatatcccacggtagcgcaaaatcaatgccataaccatgattttctaacattattgctagaataatcgggattgcaaaactcgtatctcggtcggccgcaccgtggcgaatccgccagtgcttagcaacttgtgacgaagttgtcgttaagtaactgagcggattaatcgcctgaatcagctcagcgtccgctagttgtgcagtcaccgtacttcgcgtctgtgccaaggccgtaaagtgcttggctttcgccgttgcatcgccaaataaattattctctggactcgtcaaatctaattggtcaaacgccgggacggctttcatgcgagttaacgacttcaaataagctgataaatccaagtccgtcacctgatttccagtaacggcaaagcctgcgtacttatgaatatccgtcccttgatcgaatgccgtctgagcagatgatatcaataattggcgaacaacatcacgaaatgaacccattcccgcctcattaagcgtcaagtgcgtcccgtcactggccgtgagtttcaactggttcaagtaagtactgaactgggcttttaacgccaacgaaagggcctgttcttcaactgtgagctgaccactaaccggttcaaattttggtcgcccattcttggtcgtccccgcaacaggctgataacggtgccagtcattaataccattaaactgccactcgtaggccatgtctgcgtgttccagattatgaatcgggcagtaagctgacaccgcaaagatatcgtcagtcgccggtgctgccccgagcgcagttaaggctggttcaaaataagccgaattgccactcgcacccgctaaagccgaagtggcacccccagcactcgttccattcgtgatgatccggttcgcgtcacctggcagccggccctgattatacttaacgtaacggattgccgccttcatatctacgataaaagccggcgcttgcccgacccgttgcccagacttatcaaccgtcgtacgaccgcgaattccagcggccaccacaacgtaaccgcgtttaagtgcctgttgaatcgtccctgcattcgtcggccaagtgacacgttgcggatcatccgccggtcctggcaaataaccgccgaccgtattcggcatcagaattggcgccgttgcccgctgataaccattgactgaactgccatgcaagtatgcggctggtacaaaaacgtttaggacctgaatcgctgcgactggatgctgaacgtactgaatattacgggcagcataatattgaatagcctgcccggcaacttggacctgttccggcaccagccagtcagcatcaaaaatcaatcggttactcatcttgtgacctccatttctatctattcgttactttacccccattatccagttaaaatcaaatcgaattgcgcaaccagttatgccaattgcgactaataacgattaacgtagtcagcagccgcttgtgaacccgtcgtaaactaatgttgccgtgcgttaaccagtgagcccttctaacgaccatggtcgccattgctaactaatctaactatttcaagttagctattaaatgaccgctaactaaaaacggctttctgaattaacagaaggccgttttaaaaaataacattatatgtgcatcattttagggctatcagttagccttaaaaccaatgacggataagtgcaccggcacctagcgttaatacacctaacaaaatgccgactgaacgaagcgcttgactgtccatcttagcttcgttagtttgtggcaatttagcaacttggttaggcgttgatggggtcaacgcgtcactttcagataccgttgtcttagcactagactttttagtatccgctgctggcgtttgatcagcaccatcttggcccgtcgttgtgttagcgggcgtactcgtaaagacactcgaagttgaatctttcaatggttttgacgaattagtactgttggaagtcgtactcccatcgtagttactatcgaacccaccatcaacatcgatggtcccagtatcttcatcgatatctggataaaccgccgtattatcttcgggatcttcaatgtcaccagtctgatggccattgtctggttccgtagtcgtattgtcagaactctcagaactagtatttacatcactcgagctttcagaaccggagtggtcggaactggagtccacagcgctcgaactttccgaactagagtggtcggaactggagtccacagcgctcgaactttccgaactagaatggtcggaactggaatccacagcgctcgaactttctgagctagaatggtcggaactggagtccacagcgcttgaactttccgaactagagtggtcggaactggagtccacagcgctcgagctttccgaactagaatggtcggaactggaatcgacgtcgctcgaattatttgagctagaatcgtcggaactggagtccacagcgcttgaactttctgagctagaatggtcggaactggaatcgacgtcgctcgaattatttgagctagaactgttcgaactcgagctggaacttaagtcgccagtaccgctctcaccgttaacgactttttcgtagaccttaccgttagcttcttcgctgttcttgccaccggacgtaccgccgccccattccattacagctttatttttaaaatgataattttgatcaattaattctgtatccgtaattttagtatagtaatcgatgacaactaggttgctgactgtatcgttgaatttcaagtcaaaaccattatcgctgtagttaacttgataagcatcgtcactaagcttatcacgccgcttgtaagtgttggcactcgaccattcaccattgtagacttcaatacctttgatcatttgctgatgatcaccaatggtatcggcaatcgataagtttttcatggtaatttcacgccgatcaacaagtaaggtccacttaatcgtgccattttctttatcaatggtgccttttttagacatattagcttcattagcaaccatattgatcactgatgtatcttgaccgtcttgggtatcaaacacaacgtcttgttcccctaagtcatcataacggtacttcattcccaggttaacatcaatctttacattagttttaccttcaatcgccgaattcatggtcagtacgacctgaccatccccgccgacgacacccgtaccaatcacagtaccagtcacagcatcagtcacatcaaaagtagccccaacggtccgtggttccaaattagctggcatatcaatagtgactgtgtccccagctttgaaagccgtatccccaaaactcatttgatactgaatttgaatggtatcagcgtgcttaaaatcaggaccattgatgaccgatgcggcagttgtgtaatccttcgcatgataattagttgcggcttgggcccctagtggctgactaaatagtagtaaaattgcaaaacttactaacccaagtagccagaatagtccccgcttacttaacttcataaaaaaatccccctcgtaacataatatccttcatcgaaaagtatacgctagcaagatggattttcaatagaatttgtgaataaaacgattaatatgttcatatattgtttggtccccatctataccaatcaatgctcacttagagacaaactgattggcgcgtgtcgctgcaaattgcaaaatagttaccccgacaatcattatcgccccaatcagtccgacccagttaaagtgaacgtgcaaaaataagacgcttaaaatggttgctgctaggggttcaatagctcccagaacactagcagtcgttggtaggatgtattccaagctctgtaaaaagaacaagtaggccagcatcgtgccaaaaatcacgacgaagccgacttgcccccacgccacccaggttagctgtggcgaatggtgccaagcacctgttccgactagcaccaagccaccaccaatcagcattgaccaaccaacaatgggtgtggcgccatacacttttaataattttgttggcattaatgtgtagatggttgcaccaaccgcggccaacaatccccagataattgcaattactggcaaagccagcgagtcagtgtgcccctccgtgacgattagaaccgtcccagcgattgcggagaccacagaaatgacatccactttccctggaagctgccaagtcgtggcggtgataaagataataatcatcaccggtgacaagaattgcaaaattgcggccatcgccgcattaccagtactgattgccataaaataagtcaattgaacgccagccatcccgaacaggctgaacacaatcagacgcaccgttgcccgccagtcatgaaacacggccatgaccggtaaccggcgactaaatccatataaaattaacagacctccagatactagcatccgcaccgccactaaccacaacggcgaaatcgttgtggtgtcaaatagatgttgtgccaccgttcccgagcttccccacaaaaaaggcccggcactggctaataacagtcccaccgttttcttttgcatttaaccacctccaaaagcactagccttagtctaacaagcaccaattaactttccaatggtcttttcaaattcaacttagacagtccgactgacaaacctgccatcacaccactttaagcaccttatgataaatttcataattgacactgtaatggtggtaagctaatcttatagcggggtatggaggtgccaaatgaaacatcaaaaattaatttattggttggtcggaatctttgctgtcgtcttcattggtggcgcattaatcattccaacaccaaccattaagcaacaggttgtcagtattggcaacgccattacggggaatactaaaactaagggcgctacacacgccgtttcggatagtgcccttggtgaaaaatatcaattatccactagtgaaattcacgtcctgcgcaaacttaaagtgacggggatcggtgattcaatcatggtccgcaccacgagtgacttaaaacaaatctttgaccattttaacgttaacgccaaggttggtcgccaagtgtcggaagcaccagccgtcattagccaattaaaagctgataatgcaattcagaaaaacgtgctgatcaacttggggacgaacggtccaacgagtgccgccgaaatcgatgggatcattgatcagattggcagcaaccaccagatttactgggtcaacacccgcgttccaggcaaagattggcaagaccctaacaatcaattgattgccgcggccgctaaaaaatataacaatgtgcatctcattgattggctatacgttgcgcaagacaacgacaactggtttgtcaaagataatttacatcccaacagtcttggtgaacgtgaatataccgcaacagtcggtcagacaatggctaaaacagcaacaccatagccactttatttttagacgagggttctgattacttgcattacccgtacagcagattagcccaactaattatgctaacaataacgtaaaaaagccggaacaccagtaattaacaggtgttccggtttttaatattggtcacgtcaaaaattcaacagttatcctaacatcacttactcagtcagtaagcgatgggcgttatcgtaaaagatcgcttgtttctgctcatttgttaatagatcagtcgttgttaaagcgtgacctaattgccgcgagccatctaacggcgtatatggaatatcactcccgtaaagtaggtgctcaggctgagccaagctcattaaagttggcaactgccgtggtagcacggctccagctacgtcaaaataaacatggtgcatcacatcataaacatccacctgataaaccttctgcgcatattgtgcgattcgatcatcaacaattcccaaaaaagcaccagcatgcggtataatcaccttgatattaggatatttttcaaagaagtgatacttcaacatattaataaacgtcatcgtggtatccataaaaaatcccaacaacggcactggtaaatcaatatcaacgtttttaggcaagattgctggttcatttggatgcaaagccacaatcgcttggcgagcatctagttcttggtagacccgttccaagactggtgatccaaagtaaagtccacgtgagttggttggcactgtgacgcctaaagcaccatcctggtccaaagcctgttgcaccgttttgacagcatccagttcataagggattggtagactcgccaagtatcctaattgatctggatattgctgggccaagcttttaccatcgtcgttagccgcttcaactaagcgtatggtttccgccttatcaccgaagttcacgtgtggggatgatagcgataaaatcgagtaactaatatcattatcacgcataaagttaagcgtaagctgtggtgtccactcaggtgtcggccagccatcaggatcacctggaacatgacgctttagtgcctcaacgtaactcgttggtaaatagtgggtatgaaaatcaatttttgacattagctgcacctcgttttttagaataaccatagtctaagaccaaacgagtgcgttggaaatgtacaattgatgtcaaattgaccatttacaggaggtgacatgatgacaactaactatccgcttgccgtacagaaaatgttcgcaactgtcccaacactactgacagcgacacccatctttaaattgactgtcaccatggtcgtcaaagcagcccacgttagtcgtgggagtttttacagtcactttcaagatatttacgacttcattcacgctttcgaacatgctttaatcgaacaagcaaccgtttcaaagcaagtccttaaccaagggattcaagctgccttggttcatcctgacccgcggaatgcttatccaacctatctggaattaacaacgaatatcaacacccaattagctagttttcaggccttgcttggcccccatggtgatccacagtttcttgatcagtttcaggccggtctcattgataatttactcgccactactgagcaggcgcccttaaatcatcaatatttccagtcgattccggctgactacgccatgccaatctactttagtggcgtgctggcaattattcagcactggctgaccaaggcccatccggagccacctgaagtagttgccaacattatcgttcagagccgctacaccgcagcttaccatctcttttccgatcgtccgcttggggccgataataactagaaaccaaactaaaaactggtcataatcccataattgtggattacgaccagcttttagtcacgacagtcaatacttaattatattcagtgcatggccacgatcatttgatcgccccacacttccaactgatgcagttgcttttgaaaactaatgcccgcagtcgtcaactgaaattgatagttccctgcagtcgcaactaatcctaattcggttaatttagctaaaacattcagtagtttaagcgtgctaagacccctaactcgctggcgcaaattcataatctcagttggcgccgccttcaggttgatcagtactaacgcggcccaccggtcattgaggacgcctaacccgactttcgtgccaatatttagatcacgcattaccatcagtccatacttccttacttagaatttataattattatgactattctaagtaagttggcgttgaaatgcgaataacttgcttgccatcgacttttcagacttttatttttgaatgtccagatacgtctgacaaaagtcaacgaccgctccccgtaaattagcttcatcggtgaaatgacaagccacaacatctggttttatagaagcaattttgaccgttgcccgcaatttctcaatttcagcattgattgctgggagtaggtgcggattatttgagaccgccccgcccatcacgatcaattccgggtcaaagctgtattgtaagttgtagatggcccgcgctaaggcccgaaccataacttgaacttcggcttgagcatcagtatcacccttggcagccagttcaaacacggcttgcccgtctagctcaggttgagctggatggctcgcgttgtaccgcttcgcaacagctaccgcagtacctacctcacttaagatctgatggtcattcatgagcgtgaatccaaactcaccaccaaataagtgcgcaccgtgccaaatttgatgattcacaatgaccgacccaccaacaccggttcccacaattaagaagcacaggctagcaacctgtttccccgctccatccgccaattcagccaacgccgcacaattggcgtcattttccatactgaccggtaattcaaaacggcgttgtaattccgactgaatccgaaaattatgaatatacggcagtgcgctggcaccctcaataattccagttgccttgttgacagccccgggcgaactaatgcctacaccagcaatttgataatcgcgtttcatctgctcaacctgcgtggttagcaaagtgtaaaattcagctagcgttgtgggcgtcgtaactttggtcttagcaactaattgctgatcttgccacacagcaaacttaatggtcgttccaccaatatcaataactcctaatgactgcatcgttttatcattcctttatcaattaaactagttatcataacaatgatagcgcttaatatataaaatgtatattcttttataataacaatccatcccgacatatttcatcaaattatgcttttctgaccgatactagacaacaaaaacagttgattgccacgtgcccacgtcatggtaaccaactatttttagttaatctttaaattgaattttaacgtaatcccgatagagtgggacgttcgccatcagctcttgatgcgtacctgaaccactcacatgcccatcttcaatgaagtaaatctgatccgcatccacgattgtgctcagccggtgggcgatcactagggtcgtccggcccttcattaattcgccgagggcttgttggaccatcgcttccgattcggaatccagactagcagtggcttcatcgagcattagaatcttggggtcccgtagaaaggcccgggcaatggctaaccgttgccgttgaccaccactgactttaaccccacgttcgccaacttgcgtctcaaggccatctgccatggcgcgtacaaagtcagccgcggaagctaattctaagacgtgccacaactcattgtcggagtataaccgatcagcaccgtacgttaagttttgacgaatcgtgccggccatgattgccgagtcttgactgacatacccgatttgtgaccgccaactattgagacttagttcattaacatcttgctcgccaatactaatttcaccagcggttggttgataataacgttccagaaggccaaagatagtcgacttaccaccaccagacggtcccgcaaacgccaccaccgtatttggtttagcttcaaaactgacatcgtgtaaaatttgttgatcatcatcataggcaaagtcaacatggtgcatcgccaaagtctcattggcgactgcgtgttcaacaccaaccgtcaattgttcttctggttcattcaacaactcccgaatccgggccgtcgagccactggcctttgctaacgtggtgaagaactgaccaagcatcccagctgggccaatgatttggaatagatacattaaaaatgagaccaaagtccccatcgtcatcgttccactggcaacccgcgcagacgcatacaatagtaccccaacgaataacgccatcatcgttgccgtcatcactggacttgagatggaatcataaatggcttcgcgtagtccaattcgatacaacgtcttaatctgatgtgaaccagtcgttgtttccactggttcagcattggacgatttcactaagcgaatctcactcagcgtttcttctgccgtcccgctaaaattagctaaagcatcttggcgttcatgaccaatcttgcccgtctgccgcatgattggaaacatgactaataaaacaactggaatcgccaagaccataatcaaggtcattcgccagtccattaagaccatgattgcgatggccccaaccaattgcatcagtgacgtcacgacttgcggaaaagcgttagcgagcaagtctttgatctgcgtcgaatcattcaccaaccgcgacgtcatttcacccgtcttaacgttgtcaaagtagcgaaccgggagccggactaatttatgccataaagtcccccgtaaattagcgacaacattttcaccaaaaatccccaataaggaacctgataacgcgctaatgactgcactgatcaagaataagccaatcacaccaattagtaaggtctgattaacgccgtgactaaacccattaatcaacgtttgggcaaacttgggcaccatcaactgcgcaccagtcgccaataagcctaatgccaagcccaaccagagttgccaataacgagggctagcgtgccgaatcaattgtaagaattgttttaaatcaaatttaccacccgctggacgcgagtatgctgcttgtggtcgttccatctgctcttatgcctcgtgtttctaaaatttaattaaaccaatgatgcccatgaccccaaccgggacgtgggccaaaaccgtgttgttgaccaaattgcattaaatcttgaatatcgatgtcatccgcattggcccgcaacttatctaataaatgttgtaactgatcgcgctcatcatccgtcagattaccaaataactgatccgccagatcactcgttccttgcgcgcgatggtccgccatctcacgaccacggtcacttaaccgcacgatgaccacgcgtttgtcatgagcactaggttcacgttcgatcaagccgccatcttccaaacggttcaatgtggcgctgactgaactcggccgaatatctaagatctcagcaatctcagcattggttaaaccagcgggtgcatccgccaatacccgtaaaatgcccatttgaccacgcccgctacgctcagaaccatggtcgccaaaatgaaattgttgcgcaaccgccatgacgaaggcccgattttgaaataacttcccaaaactactaaataaatcacgattattaactgtcatgaatttttgtcctccttgatttgaatgatgcttatgttagcacgatagttagataaatacaacaaaaactaactaaaattctaaccaaaagttcaaaaaatatctcaagccctattaaatcaaggtttgagatatcaaaaggttaactcaattaaatgaattcggtaacctgcgtgccagcgtaacgcgttgtcgtgattggttcgctagctgccttgccaagtgcaatagccatcactggtacatagcgcttggcatccaagccaaaggtcgtcgcgactttatctgccgcataacccgcaattggattagcatcatagccatgtgcgcgggcaatcaatagtaattgcattgcggccatactactatcaatcatcgcatcagcttgtagaaattctggactcgcattttcatacattggtaagaacgtcttgaagatttgatcccgcttttccggggtaatgcgtccttcttcacaagctttattccacacgtcccgatagaccaaatgcgattgcgtatcgcccaggacaaaaatcatggctgaacaagaatcaatttgtggataattaaatggcattaaaaccgacttcgcctttgccttaccgtccgcactatcggcaaccacaaaatgccaggattgcaagttgcatgctgatggtgcgctgattgtctcatcaataatcgtttgcaattcttcacgctcaattttgacagtcggatcaaactgccgtactgattggcggttaaacaccacgtctttaaaatcattatttttaatattagtagtcatggttgttggcatcctaaacaactccttttttaaaagtaacaaattcattaatcaatcttattataactgattttgtatttgttttcacaattattttgaaatcgctatcattagcacctattattccgaccaatatttattttttatgctcattacctggggtcatcgtttataccagtattacttatgcttgtcggacttgtagttccgtatttgtatttatattagaccactcccaattgtactgttaatcttattaaaccaatggactataccaataaaaagcggttgtaatagcgctttcagcaccgtacaataatgattgcacttattcaaaactatctttttagggggattttgtacatgaagaattatttgcaacgtatgggccgttcactgcaattacccgttgccgttctacccgcagcagctttacttgtgggaattggtaactggtgggcatctgctagtaacgacatcgtcgcacacttcttacaagccggtggtaacgctgttctgagccaattaccactactctttgcagttggtttggcactcggtatgtcaaaagataaagatggcgcagccgctcttgctggtttagttgcctttgaattaccaactaacgttttaaaaccagaatcggtcgccacactcttgaatatcaaggtagccactgttaatccagcgtttggtcaaattggcaacgtcttcattgggatcatctctggtctgattgccgcagctctttacaatcgcttccacgagaccaaactaccgatggctctttcatttttcagtggtaaacgtctagtcccaatcttagccgcgctgaccatgttattagtcagcgtcgcgcttctcattgtttggccgcccgtctatgatgcgttagttacctttggcaaattcatcgtgggtctcggtgccgttggggccggtctctatggcttcttcaaccgcctattgattccaactgggttgcaccaagcactcaactccgttttctggtttgacgttgctggcatcaatgatattggtaaattcttagcacacaaggggatcaagggtgtgactgggatgtaccaagctggtttcttcccagtcatgatgtttggtttaccagctggggcctacgcgatttaccgcaatgcgctaccagaacgtaaagttgaaacggcatccctgatgatggccggtgcgtttgcgtccttctttaccggtgtgaccgaaccattagagttctcatttatgttcgtagcttggccactctatgttttacacgcaatcttcactggtttatcgctagcctttgctgccttcatgcactggacagccggttttgccttctccgccgggttagttgactacattttaagccttaaaaacccgattgctaatcaacctttaatgttaatcttacaaggattggttctagccgtcatttactactttggctttgacttcgcaatcaagaagttccatttgatgacaccgggccgcgaaccagtgacagccgatgacgccgatgatttagccatcgccactgatgcggatgatgacaaatacacacgtcaagccaagcaaatttacgctgcgctcggtggtgccgataatttaacggttgtcgataactgcacgacccgtctccgattgcaattagccgatacgtcaaccattaatgaagccgctatcaaacacagtggtgctgctggtattaacaaattagacgaccataatctacaaatcattattgggaccgaagtccaattcgtcgccgacgcgttgagccacttaaagctcacgaacgcacccattactaagaccacgactagcaatgaagctgttgcgacagcaccaactgcgactaatatcactagtggtgtgaccaccgacttttacagcgtcgctaacggtcagtacgtagatattgaaaacgtcgacgacgacacatttgctaagaagatgctgggcgatggcttcgcaattgatcccgcagacgggacgattacggcgccggtcgacgggacggtcagcaccgtctttcctaccaagcatgcaatcggttttaaaaccgattcagggttagaaattctgctgcatatgggtattgataccgttgagttgaacggtgctccctttgaagtactagtccaaaccgatcaacccgttcaccatggcgaagtagttgccaaagctgacctggcagcgattaaggctgctggtaaggccacaaccatgatggttatcatcactaacatggatgctgtcaatttgatgaaattcaagatgttgaccaaccaagtcaaagtcagtgatgagattatgttggtcacgacgaaataacttgttacatgcgccaattatatgaacagccccctacgtatttgatacgcagggggctgttttcgataatcaaatcgccggacaattccttaaattttccttaacgtaactcattcgccatttagcaacgtttaccggcaattatggattattcaattaactgatctttccagaattatacgtcatatgaatattatcgccacgaaactaatatggtatgctaaaacgattgtcacctagcctcggaagtcggacgaacacgtgttgatgaactgcaatctaaactaacagcacgccttaatcatgatttgcacgaagcggtgactaaccgaacctacaataattatattttggtattgctcagcatgcgctaagctagaaaggaaaaccaatgtattttggcgatttaattttcattatatctatcatcggtggtctcatcagtttaggactgatcatttatttgattgcgaaattcgttaagtaagataatgacctgctaattgatcatcggccgttgcaagtcgttttttgcaacgacagcctcacacctcagctgcgaacatcgtcaccaagtcatccgtccgcaatgcttgcttctcggcaccacgcacgtccaacttgatttgcccatcctgcaccatcaccagccggttgccatacgccaacgcgtcgctcatcttatgcgtaatcatcatcgttgtcagatgattggccgtcacgatttgttgggtcagtgccatcacttccgcactcgtcttcgggtcaagcgccgctgtatgctcatccagcaacaacagctctggttggctcaaggtggccatcagtaaggatagggcttgccgttgccccccggataaatacttcacttgcgtattcagtcgcgcttctaaccccatattaagactagccagcaaccttaagtatcgttcttcctgtccacgttggcgataacggcgcagactcaagctccccgtatgacgttgggctaacgtgagattctgggccacacttagttcgccagcggtacccaacttaggatcttggaacacccgggccacccaccgtgaccgatacgcaacgggacgattggtcacacgatgatcagcaagtgtgatttcgccagcatcagagttcagtgttcccgcaatcgtattgagcaaggtcgacttaccggcgccattgttcccaataaccgccacaaattcgccaggctcaatcgttagatttacgtcctttaagacgtgccgctcgttgctggttccgggaaagaagactttttgtaagtgttggacgttcagaatagttggttgtggcatgttgatcgactccaatctctttaaggtaccggtgtaactgccgttttgtccggtatttattttgtaatagtggcaagcagatgacgataacaagaatcgccgctgataaaatctttaagtcattgacggggaaacctaaacccattgccaaagtcaataagtaacgatagataatggcgcccacgaccattccagtcaaacggacccagatttgacgaccatgtaagaagatttcaccaactagcactgaagccagcccgatgacaatcgtcccaatgcccatcccaatatccgcgtagccgttactctgtgcaatcagaccacccgataaagcaatcaaaccgttagataacatatagccaataatgaccatccgatcggtatagattccattcgtagcactcatcgcaggattattacccgttgccatcaaagacagtcccaaacgcgtctgaaacaaccagatcaacccggccaggacgaccagcgtgaccatcgcaccaatcacgatagtttgtaaattcaaagaccaactcgctggtaaccagcccatcaacgttttctggtcaagcaagggaatattcgctttgcccataatgtgcatgttgatggaatatagtcccgtcatcgtcagaattccggccaataatgacggcattttaagcttagtatctaatacccccgtgacccagccggccaaacatccggcgacaaatcctaataaactcgccacgatagctgactgtccggccaacatgctactaatcgtcacggcagcccctaatggaaaactaccctcggtggtcaaatcagggatgtttaaaattctgaaagtgaggaacaccccgatgaccagtggcgcccataataaaccttgtccaatactcgtgattaacatattacctcgctcccctcttatggttgcttgattgtacttggttgtaagccgattgccttagcattcgctttattgacgtagaggtgtaacttgtcagctgtttgaaccgccattgtttgcggcttctgcttcttgattaagacttggtaagccatttttccagtctgttcacctaattcgtaatagttaagaccatacgtcgcggtcccgccatcttcagccatttcaatcgaacccgttaccactggtagctttgcagccttggtcttctgaccaatcgtcttcatcgcactcgccatcaaattatcggttggtaagtaaaggccagatatcttacccgtcaaaccggccaaaacactggcaacgtcattagtactcgttgcgctaacgacctttaagttgataccgtgctttttcgcgtaagccttcgccaacttgacttgtagcactgaattttcttctgacgagttatacataatccccaacggtttattacctgtactcatattcttcaataactgtaattgtttgccgacgggcattaaatcgctcgtgccgctcacattagtttggggcttcgtatcacttttcaccaatcccgccgctttcaaatcagttacggccgtaaccaaggtcggcaccgtcgtcgttttcttggctaatgcctgagcagctggcgttgcgatgccaactaacaaatcatttttctgttggacgagttgttggctcattgtattcaaattactctgatcaccctgtgcatttagatagtgatacttgaccgttactttactgttatgcgcttttaattctttttgtaatccggctttgaaccccttgcgcgcttggtctagtgaaccatgttgaaccacctgtaagatgcccaccgacacgctttgctgaccactcgttgcttgtttgccacaaccagctaatagtaacccagcacctaaaattaatacccctaaagttgtttttttcatcttgaaacgctccttaaaaattgtctggttcgcccaacgttcatcaacgtcttgatgaaccggactgaaaacaaaaaacaccagttagattctgggaagaatctaactggtgttttatcgggcccgatatttttccagatagattgtccctgcatctacctggcgtttaagtcatgttgaataactttagctctcgatagatacaaacgcgttgcgtgcgcttgtatccatcaaacgaatacaaacgctatctaaagaaaaagctaaaggcaaattgattatttaattgaaggttagttgctaatgacatattagtcatcctccgtttcaatttatagctaatagtaaaccatgacgacacctaacttgtcaactgcgaaccagtaaaaaattcaagtgtaactggtcaaagtccccgtcacccaactgatacacgctaacttatttatctggcgtatcactcagagtccaactcaaggtaccttgataagtatcagcgtaaatacctggttgcgctgataatccgattcccttcgttgtcgaccaatcatcagtgactaccgtatcggtcgtccccgcgactttttgtccctgttggaccaacgtcgcttgattcgttaagacggtctgtgcactaccatcacggtaaaccaaatcgcccttcaacgtccgtccactgaccgttgtcgatgtcagcggcgtggcactaacgtacaaataccacttagccccggtcgcccgggtatcagtcacactgatggctagtggattagtcggttgatagacttgtggtgtcaacggcacctttaaatcgccgaagctcatattggtcgttaattgaccaaacgacagcgtccctgctaacttagttacttgtagtgcaattttatcagatgttaagccgctggcgctcgtcgcatagatgtggaccgtggtactctgattatcagcgagccccttgaataacgcgaccagaccgctctcactcgcatgataagtcatcgtatcattagcattactaggattcgtcgcaaccacgccagcctgcttaactaaccaattaacagcatcgctatcagacgttaacgccgctagatcactcacggacaaattcaccgctgtgctgctacttttgattgtcagcggtggtatcgtcacgtccttagtcaccgattcagattcgccataatcggcttctcccgtctgcgttactgtgactgaagtgaccccactgaggccatcatttaacttaatttcatatttaccatcactaccgattgtcgccgtgtacgacttaccattaattgtcgtgctgacggtattaccggcaatcccagttcctgtcagagtggtatccgtcgttgttggcgtattcagcgtcgtattaaggctaatccgattaaacactgccaagcggtacgtggatgtctcaccctttactgtagttaatcgaaacccaatatatactggcaaattatcctttaacttactcatatcgactgtcaaagtcttgctagtattcatcgataccgtactagaaccagtcgccatatttgtcggagtcttggtcactagtgaagttccaaattcttcggttgcttgcttataaaagacatcgtaatatagcgttttaatctccgaactattcgcaaacaacgaaccactaaaggtcaacgttattgtggtagtcttagtcgatatacgtccctgatccgcatagttggccgtcactttggttaagcttggacatatcccaattccacccgagatattgaacccaacgacatcaccgctattaaagtaagtgtagtacttattactcgaattagcgattgtcgttgtcgcagacgtcacgggcgccgctgcctgactcgtaatcgctagcatgctgataaacgctaagcagctcagtaacagcatgcctagcttaatatgccgcagtcgtttcacgtgttcgcccccctttcacgcattaacttaagcacctgccaccctaataagagtgccattaaggtcaggaacccgagccactgataatagtgattcgcttggaccccggtttggggcaaacggcccgttgctagtacctgttgccactgaccgacaaagcgattgggcgcggctttgacagccttcgttgcgtacacaacgtcgccctgcggaatttgttgcaccgtcgtaggcgtttgtttgtccgctgaacgtgacgtatagaactgtatttgtgtcgacgaagtgcccaccgtctgagcagctcccccgatggatggtcctaggccgattaataagcccagtaagcccagtaagccccgtatcaacagccatcgcatcatttgtcagtcccccttttttgcccagctactaattgttcatgacgcttagcggccccaaactaaacaccgagccgattgctgttagtcttgggattgccgccgcttcttcaagaaaagcactaaccacaaaatcagtaagactacaatcaacatgcccagtgcgcccagaccaatcaaccaccagatactgatgccgttatcatcaaccgtatcctggttatacgtcttagccgtggcagcactaatcttgaaatcgcggtcaaaagtccacttatgagcgctattgtgcgcaaccaagtgtaaatgatacgtccccgcttgaagcttctgtttgttgagtaacaatgggtaattaaacgtcgtattaggtgccaacatcacgccttgtttggtcgcctttacgacggttttgccactatctttggctgtgaccgtcgtcttcatggtaacccgtggtatcatcactgctgcagtattgcgtaacgtcaccacgatactccggtgataattaaccattccagcagcgacatcgcttagtttcaagacgggcgtggccgcagtccctaagctgtacttgatgcccaccacataagaatattcactgctaatattcgtagcacccttcacttcaccagtgaccttttgatcgacgcgtttaaaataccaaccacctaacagggcaccgttaaaatccttagtcggcatggtcgtttgggcactgaccagcttagaaccgttggctggaactgtcaccgtcgttggccccttgattttagtcaattggtcgacccgatactgcagtgaggcatcatactttttcgccggggtcacgtattcaatggcgccaccactgttggtatatgccgtatgaatccccatcgcaacgcggatatcccggttagtcgtattatagattcgcgtctgcaacgtttgggtctgccctgccgtcattttgaggtcaaaaaacgttgcctgtttatcaatttggtttctcggcgtttgggccgcgacactaaaaccaatattattactggtgtccgtattggctgcctgtgctggaaccaccgcggccaagccgctgatcatcactaagatggcccctaaccaccgcatcattttcttcattattgcgtccccccgtcgattattatgtaaaagagacgcccactattacgtggtcatctccaagttcattaatttaattatctgctgatgatgttaatgtccaatttaggacgcccttgtaagtcgtagcggccgccgtgttagccacgacgttcaacttaactgcagccggatcaagcaagtccgacgtaatccccgccccactcttatccgctgctgtcataacattcccagaagttgtccccgtaaaggacgccccggcactagtcgaagcttgactacctaagtcaagttcaacagcttgtccgaccgcaccattaccaccggtactgccgttgctagcttccgatccggaagaaatgaccgtccctgcaggtaaggagaccgtggcccccttaagcgtacttaagttaccatccgtgccatccgcagcggcaacactcaatgtccaacccgcattcgtcccgcgttgatcagagacttgtaaaccaactttactcgttgaccccatggtgaccgtgctaccatcgctacctgttaatgctttatagctttggttattgatcacgtcaatttcatgtgaaccgaaatcaagtttaccgggcgcatagatcagtgacaaaccagcaccggaattggcaccgttatcgccatcaccaggcttagggtcaagtggtttcgttgggtcagtcggatcgaccggatcaactggattagtggtatttgccgtaaacgttgccgttgcattcgtcgtcccactccgattttcaccatcggccgcgtgaccaacgattggcgttaaggcccccaataaaatggtactggtcatgagtaaactgcctactacttttttcatatcgtgcatcccctttagtttgcctaattcattaactgcactaataatttaccacacttcccaacaattacaaccccttaatctttgagtcgcttctttgttaactcgtgaaaatcaaccaggtcaactgttccggccgtattttgtatgtggcattaattttttgtttcatcatttttgcattaaaaaacgttctatccgctgtttttctaatacttgtacaacattaataaaacaacagatagggatttaatccaattaataataattttttttattgtcacgttcaggtcagtatcgttcttcttgatcagtctcggtttgctatcaattttattatccggtcttaaatttgtgtgtaccgctcaaaaccgcatggtaataacgaactcaatcagttatcactactcctcacaagtactagttagttgccgtaatttcccatcagctagcgaatgtcctgtctataaaacattcagtcgaccgcagtcttaagtaacaatacgtcaaaaaaaaagactcaggattgaatcatcctgaatcttttttgtgcccacacactttcaccacgccctataactttgtacaacgcgatgtctttagccacctaatctccaataatagacaatagccgccagagctaatcactgaccggttgtacttcaaaacctgctgctgtcaagacttggttaacatcggcggcctgttcactattcacgtggagctcaatcactttttcagcctggtgatttacgaccattaacgtctgaatacttaaatcgtgttctgttaagacctttccgatggcaaaaattacgccgacatggtcatgatggaccaccacccgagttacgattcccggctggccgtaaccagcaatatttaagaacgcatccaagatatcattattagtaatgatgcccacaacttggtcgcccgtcatgactggtagtacgccgatcttatttttccgcatcgttgcaatcgctgtttctaactgagcggttgctgcgacagtttgaaccgccgtttccatgatttgatccaccgtcgtcttagtaagtaagtaatttaattcatacaccgacaaactcgtggcctgtgatggcatcgcacgctgaatgataccatgcgtgatcaagccgaccattcgattacctgccatgacaggtaaccgatgaatcgcatttttcttcattaattcgaccgccacactgatcgtcgttttaggactaacaacgaccaggcgtggtgtcatataatctgcaacactcatacttaaccccctagataagctttctgaacttctgaattagctaataattcggaaccccgaccactaagcttgacttgtccactagctaagacatagccgtggtcagcgattttcagggcttgattggcattttgttcaattagtaaaaccgtcgttccagcctgattgattgccttgatgatctcaaagatctcattaataaagatgggcgctaatcccattgaaggttcgtcaagcaacatcagcttgggctgcgccatcagtgcgcggcccatcgccaacatttgttgttcaccacctgagagcgtcgcggcatcttgatgccgacgtttcttcaaaattggaaagtagtcgtaaacttgctgataagtctgagccaattgaccccgatcctgccgtaaaaaagcacccatttgtagattttcttgaacagacaggccgggaaaaatatggcgtccttcaggaacttgcgagatacccgcccgcacaattttaggagcggccgtcttttggatgggttgatccaaatagtgaatagaaccactgaccggacgcatcaagccagatatcgtgtgcaacaacgtagatttcccggcgccgttagcaccaatcaacgtaacgatttcaccctgttgcacgtcaaaactaacacctttgactgcctgaatcgcgccgtaattaacgactaaatcacgtactttaagcatttacacccctcctagataggccttgataacggccggatcatgttgaatggcttttggcgtcccagttgccagtaacgccccgtgctccaacacgtagagccgctcgactacgttcataactagtgacatgtcgtgttcaattagcacaacggtaatatgaaattcttgttgaattcggcgaatcaagcgcgtcaaatccgccgtttcttcgggattcatgcccgctgcgggttcatcaaggaagagtaacttgggcttcgtcgccagggcccgcacaatctctaatcgccgctgaataccatatggtaaactctttgcgggctgatcagcgacggcggtcaaatcaaacatcgctaataaggcttgcgccgcctgggtcattgcccgctcagtctggtaatacttaggtaagcgcaggatgctagtcaaaaaccgttcatgataatgattggtcattgcaatgcgcacgttatcgagtacactcatctccttgaacaaccggatattctgaaatgtccgtgaaataccaacccgagcaatcgcagcgggctgcttgccatttaacgacaccacgccctgatctgtgtagaaactaatgctacccgaactaaccggcgtttcaccagtcaacaagttgaataacgtggttttaccagcaccattcgggccaatcaaaccaatcagctcgtcttgatcaaaatggagtgaaacgtcagcaacggcggtcaggccgccaaagtttttgaccaacccttgtgcgtctaataaccggctactcatggttaaccgcctccttagttgatcgccgtctgaatagacgcgtgaatgagaactcccacgttcctaacagtccggctggcttaaaaagcataatcaaaatcagtgccaatgaataaataatcattcggatcgtaccgaagttttgtaagatcgtgtcgagcgctcctaatacgattgcggctacgaaagtcccggtaatactgccgaccccaccgagtacgacaataatcagaatcgcaatggaagccatgatattaaaatcacccggcgcaatcgtctgaatgtaggccgcgtgcaacgacccaccaatcgccgcagtcgccgcgccaaagacaaaagcggccaacttccagcgcgtcgtattgattcccatggcaccagccgccagttcatcatcccgcacagccatcacggcccgaccaccgcgactgtgaataaagttgaccgtgataatcgttgtcagacacattaagacgtacaccgttgcccacgaagcaagtgccgggatattgaataaccccgctgcaccgttcgtaattttcagattattgattagaatccgaatgatttcggccgcccccatcgtcgcaatggctaagtaatcaccgcgcaatcgtaatgttgggatgccaacaatgaccgccgctaccatggcaatcaccatgccgacgatcatcgacagataaaatcccgcgggcgtcgccattgtttgggtcataataccagtcgcgtaggcgccaattgccataaagccggcgtgaccaagcgagaactggcctgcaaacccaataatcagattgagtcccaccgccaatataacgttgataccaatcgtcaccagcatattttcaataaacgagttaatgacgcccatcagctctaaaccgtcaatcacaacaaagccgataaccatcacaccgagccacgccatgttagttttcaaatttgctttcattaatttggcgcctccctcagactttttccttggttcgtttaccgaatattccagccggcaacacgagcaaaataacaattaagacaaagtaaaccaccgcgtccttgtatgcggataggccaatcgcctgaacaccagtctccaggatgccgataataaagccccccaatgaagccccaggcacggaaccaatcccaccaatcacagctgcaacaaaggccttgataccgggcgtcatgcccatcaacggatcaatcgaattatagtataggccaatcaggactccggcagcgccggccattgcagaccctaatgcgaacgtgaacgaaatcgtatggttaagattgatgcccaccaactgtgcagcttcgggatcaacagaaacggcccgcattgctttacccattttggtacgtttgataattaattccaatagaatcattaataggcacgccgttcctaagatcagtagctgcacattcgatacccgcaatccgccccagtgataagtcaccactttgattgcttggggaaatgaacgggcactcgcaccaacaaagtatgacattccattctcaagcaagaatgaaacaccgattgccgtgattagcgcggtaattcgcggtgaatggcgtaatgggcggtacgcgaagtattcaataatcacaccactaactgcgcagatcaccattgcggacaggagcgccgcaacaaagttaaagtgtagtgacttcaaactgtaatagccccaaaaggcccccaacatataaatatcgccatgtgcaaaattaattaatttgataatgccataaaccatcgtgtagcctagcgccaataacgcgtagatacttcctagcgatagtccgttgatcaattgttgtccaaatgtctgcatatgtgttcccccacgctttcactagtctgactatttgacgttataaaccttgctgaccacgccattcgtcaattgttcaattgaaatcgtcttttcaggattatgttgcttatcgatagtcgtcgtcccagtgacacccttgaagttcttaagtttggctaaaccatcggcgattttaacagaattagccgagccttccttttcgatggctgctttgatcatataaaccgaatcataagcgagtgctgaaaaagttggtgcggtactaccatactttgccttgtaagcactcataaatttcgaagcaactttgttcgttgccgaagccttagtagaaaatggcgtcgtgtaataaacattggtagcattagacttgccagcaatttgggctaatttagcatccgccatcccgtcactaccaacgattggagccttgattcccgcttgccgcgcttgcttaacgattagaccgatttctgaatagtaaccaggcgcatatatggcatcgatctttttatgtttcaacgcagttaggatggcattaaagtccttatcgccctcttggaacgtttggctgctaacgaccgtgccccgatactgcttcttaaacgcctttgttaggcccgtgccgtaatcactggagttatcagtcaaaatggcgacacgtttcgccttcaagttcttagtcacaaaggttgctgccgtggctccttgaaaattattctgatagcaagctcggaatatgtacttttgaactttgccactcttttgcaacgtataatccggatcggtcgctgatggactgactgatggtactgccgccttagtcatattagggatcgccgcagtcccggcgctagttgtcgcgggaccaactacggccacgaccttatcgttattcacgagctgggcagccacggaagcagcagtcgtgttcgatgtcttattgtcccggatcaccaactgaattttcttcttggtccccccaaccttgattccaccgctcttattgattttcttgacggctaactgaatgccttgcttttgctgttctccataaccggccgcagatccagacaattccatattgaccccaattttaatagtcttgccaggattatttccttgacttgaacttgatttggcagtggcacaccctgccagtgtcaacgccatcgcaccaagtgctgcaatcttcatcgtttgtttttcccattttttcattagttattcccactttcgtttttttattgctacgttgttgaccccgatcctccttaagtcacaaaaaggcctcatccaccgtagtgaatgaggcctttacccggaactgagcctcattaccacaatgggaaagaagggctcagttcacttgaattttgagttatactcaaggtcaagtgaccgggtccttcttcgttaataataaggctaaattttgaacagcaagggttgtcaacaagttggttaggttagattgaattttcataattgacgcgcctcgctttcaaaagtttttgtaatgttgatgtttcttagaattaattaacttttaattataagtcaagtgaatttttaattgtttttatattaattaaaaggtaaaccactacgggctcatagtgtcgacagtaattcaaaaaaattatttttggtcttgattagcttcggttgagaggcccccctgaccaaccagcttattcagccggattaaaagcataaaaaaagaactgattactaaactggcaatcagttcccattcaaaaattaggccgtcatggtcgttattctagttaagcctttaagagtttttcaacttcgctcttgagcttagtttcgtccatactcatataaggcgctacttcgtcagccgtcttgtcagtatcatgactatcagcgtccataaagtgattccaaatcgcatcccgtacgggtaacttagagtcgctccaatcaaacacgtccgtcatcttttcgtctaacatactgttcatttcaactgctgcagccatactaaaacaacttcctttctaatttttgatacaccttgattataggtcaaaatttgaaaagtggttaaattttgtttggtattacgaaaataaattacgcattcttttgataaattgtttccagggccgcaatatcagcacttgacaacgtgctcttaccttgtgaaaccgggtacatcacggattcagtcgatgaactgtgatccaaccctaacgcatgacctaactcatgaactgcgaccgatttactgaaagctgaggcgtatgagccgttaagactagccgtcgcgttattccaatattggatacctcgccagctaatttgcttagtaatatcagggccaccatgaccaagttcaacactggtcgcaccagtcgtcatttttttatgatacatcgaaaaagtcactgaattttgtgacccgctggcttgaccagctaccagatggactaacccagtctggttataagtcgcgacagcttcaagaaagacctgccgggccgctttgggaacattatgatcgaaggaataataatacgtcttctttaaagtggcgttctgcacgatcgattcaatcggtgttgcttgcgttgttgaactagttgcttgcgaactcgagctagtgaccgaactggcactcgcagtcttatccgtctgctgacctgatgattgcttacttgagttagtcgccgaatcttcggtagcactgctagtatcatcagcacccaacaaatgactagataagtcacccgacaaggcagccgctagattctgacgactcgtctgatataaagctgccgcgcgcggggcaagcgtatcatagttgcgccacccaaataacacgaggccgattagacacagcgctttgattccgcgcattagattttttagcatgctgtgcgctcctcttaattttttaacatggtgacaagcaataatttaagtttattaaaccacatgacaccccacttaaacatagctcttagtgaatcattaagaatatttaggattaccgcaatctacttgtaatcttaatccgctttcacacacctactcgtcattctaacaaccgcggcaccccactgaacaaaaaaagacgtgaattttcattcccgtcttgatgtggctacttatttcgaaaaacatacagtttcgagaacaagaagttcccaatgatggcgccggcctgcccaagaatcttggctagtaccgccgagctccccaatactgacatcaacaaccataaaataatcgcttcaacgacgtacgtcactatccgggtcgcatagaacttacccatttcacgataaacgtggtgtgaatgatggtcgaacactttcaagcggtccacccagaacgcgacttgaacggcaatgacccaggaaataacattagcgacctggtattcgagtccgattaggtggtacatcgtatagaaagttgcaaagttgaccgcaacactgatcaatccccacaagatatagcgaatcgcctgattacgggtttctttaacgggtgaaataatttttttatctaattctgctgctggctctaaaatttcagtaaccgtttcctcattttgatcaactttaatcgaatctggcttactcatggttactacacctgactttcttcacttaaacatgattattgtgaaagaattctgtttaagttgtatcttcatttttatgagtaaaaataacacaacttaatcttagcacagcagttaactattggcgatggcaactattcagttttaccccaataattcacatacacaaaacgccaaccagctttaactgtccacatcagctaattctgcagctagttggcatcatcatggggccgttgcacatcaacgaataaccaaaatctgcgacaatcatgaattaaaaacggcttgccgtagccgataactcatcattatcataggtgccaaaatgatcgttgagcgtgactcgattgctgctaaatagtggtcgcagcatttaataacaccatccacaacctgaacgcctaatctgaagtctttctcgcccgattgagcggaatttcaatcgccatcacggccgccgctgtccaaataaagagatgcaagaagtcaccaactaattttccgctcacattccccgctaaatatgcaccagcatgttgatttaagaactgggttgatgggatctgactagctagttgtggccacaccaacgcgatatttaaaaccgccaacatcgtaataacccccactaattgccacgcctggcgtttagtggttgcccaatcatcaaaataattataattcataatcaacgtcgtggtcatcacaatcaacccaccattaatgaccatcgtcacgatgccgtcgttccaatgcaaaaaatagtgcaaatagcttaaaaatagtaggccaacgactaagtcataactgattgccaccaagcgctgctgccgccgattatttgccgactgagcctcgtagtgttttaacatccctaaatctcccttcaatagttgatcgactgaaaaatcatacgccatactaatttgcaccaacatgccaatatctggatagcttcgaccattctcccagcttgaaatcgtctgtcgtgaaacgtgtaattgtgtcgcgatgtcagtttgagtcatcttcttttgttgccgaataatttttaaattatctgaaaaattcattttcacacctccaagcacatcgtacgcgacgggtgattgttcggcaagataagtttctaagcaagtcgatgaagccggcgatttgcgcgtgttgtattttttgagaatcgcgaaccaaaacgctacgacaatgatttccgtcatagcgttttagtctgcttggttgactgcttagtaagttaaaaatattattatcaattagaatgttttatatcaaactgttttaattattttgtaggcatacctaaaaaagtatttccatttacttttatttattgtacaatgacaacggctcaaagatttagagatatagaaaggtggtcttttaattgagcgaaaagacgaacaccccaaaccggaagcataaattgattgaatatgctaacggcccctcactagaggaaattaacggtaccatcgaggttcccaagaatctgaacttctggaaaaccctctttgcgtattcaggtcctggtgccttagttgcggtaggttacatggatcccggtaactggtcaacttccatcaccggtggtcaaaactaccaatacatgctaatgtctgtcatcttgatatcaagtttgattgcgatgctactacaatacatggcggctaaacttggtatcgtgagtcagatggatctggcccaagcgattcgggcgcggacgagtaaatcactcggaatcgtcttgtggattttaaccgaattagccatcatggcgaccgacattgccgaagttatcggtgctgcgattgccctctatttattattcaacattccgttagtcattgcggtgtttattaccgtgcttgacgttttagttttgctattattgaccaaaatcggttttcggaaaatcgaagccatcgtggtttgtttgattttagttatcttattcgtattcgtttatcaagtcgcactgtccaaccctgattggggcggtgtgatcaagggcctagtcccaaccgctgacactttctcgacaagtcgttcagtaaacggtatgacgccactttctggtgctttagggattatcggtgccaccgtcatgccacacaatttgtacttacattcagccatctcacaaacgcggaagattgaccacaacgatgaggaagatgtcgcgcggaccgttaaattcgctgcttgggattccaatatccaactttcattcgctttcgtggttaattcactattattgattatgggcgttgccgtctttaagagtggcgctgttaaagatccttcattcttcggtctttatgaagcattgtccaatacatcaatgttaagcaatggtattttaatcagtgttgctaaatctggggcgctctcagccctcttcgccatcgcgttactggcttctgggcaaaactccacaattaccggtacgttaactgggcaagtcatcatggaagggttcgtccacatgcggatgccactctggttacggcggttagtgacccggttgatctccgttattcccgtcctcatttgcgtgctattaactagtggtaagagtgcaatcgacgagcatactgcattgaataatctgatgaataactcacaagtctttctggctttcgcccttccattctccatgttgccactattaatgatgactgacagcgcggcagaaatgggcaaacgattcaaaaactcactttggatcaaaggtttaggttggttatccgtcatcggtttgactttcttaaacttactcggtctaccagattcaatcttaggcttctttggcgataatccttcagctggcgaacagactttttctaaaattctagcctaccttttgattgccgctatcttagccctacttgtctggaccgtcttcgacctacaacgcggtaacaaacgttacgttgaacagcaacttgctgcagcagcaaaggaggccaacaaataatggcgactaaattcaaccggattctcgttggtgttgatgattctgccgatgctttacttgcttttgactatgcaatccaccaagcgaagcaagatggtgccgaactggtcattatctcgattcttgaaaatgatgaaatgaacgtctatcaagcgctcagtaaagactacattcatggggaacgccaagaacttgaacagcatatattgaaatatcaaaagcaagcccaagctgctggcgttaccaaagtccacgcaatgattgcggaaggcgaacctggtgagaccatcgttaaggaagtcatcccccacgttcaaccggacttactcattattggctccctagccaaaaaggggattgccaaacactttggtagccaagctgcttatatggcaaaatacgcaccgatttcagttttagttattcgttaaatcaattaaaataacctcaaaacccccgttttcaatgtgaaaacgggggttttaggttaacaaaacattatttgactattaacctaaacatactataatagtcactgaagggggattcgattatgacaccaaacgaaacctacgacgcattagaacaatggcacttattaccggcgactaattttacctggcggcccttcaccgctaccgctatttatgttgacagcccgcatgcgcagcgtgtctatcagctagacttagctgacgacacggtcgagatctttcaggccgatccaggctcagaactgtctgaacatttcttaccatataagacagttacactgaccacaactcaaatcaatcaattcaagcatacccagccagttgcatcataacggctacgggcaaagcggcgggcacaccctcttagtcaatgattaagaaggcgtgcccgccgcttataatttcaattattaatgatccaaatcaactgctcgttgacgatcatggtgtatcaaccacaacaaccccaataagagcaccaagagtccaaccaacatcaacgcattcttgaagtgcgctttaatcagttcatcgccaccccaagcatagataatcgccgtgggcatgctgcccagtagcgttgctgcggctagctgccggggtgtcaccgccgtttcaatggccgctaaactaactaatgacgttggaataaacggtatcgtatacccaatcacgattcctaataaggggtgccgcatcttaccaatggccgtcacgagttttgacggctgttgatcacgtcgagccgttacccgtccgaaaaagcgttgtgcaatcaagttgcccagcgtaatgccaataatatttaacactgccccaagccctttgccgaaacagatgccagcaacgacactgatcgtcgccacgggggcacctggaataattgaaaagcaaatcaataagggaactactaataaaatatcaatcgcgcggtgccgtcgaacttgggccaccagtgctgattgatcaaatacccgatgctgaatgatctcccaagtaccatgatagcgatagatcaacagtccaattaatagtaatgctagcagtactgccccactgataagctgtcgtttcgttatcttaaccttcacaacttcctcccgtcattaatcatgatgcggttcatgtttaatttcatgagccacatgtccaatcatggcatcaaccatttccaaaatatggggatcgtctagacaatagtagacatgcttcccccgcttcgttttagataccaactgatactgaaacaaaattgctaactgatgcgagactaatggctgcgccaaatgaacatgttcaacgatttgcgtgacgtccgcttcatggtgttctaaaaaaattaggattttaatccgattaacattactcaatactttgtatattttagccgcctcagttaatagtggcccgctgacctccatgccaattcctccgttctcaccaatcataggaatgcgattaaatggctaattagcccactatcccagaaaacatataagccaatcaccacgtaacaaattttcatcaaccgttcaccatgagccgctatttgcttttgaacagccttgatttccgccacctggttaatgataagcacgacaagcatcgtcaatataccaataaatcctaaagtcatcacaaagtgtaccatgctttccccaacgagcacaggtaaaaagatcgataaattacaaccagcacatacggccaaataagtaactagtacgttaatcaccggcgacccaccagcccgatcggcggtatcatcatcatcgtcgtgaaacgcaagccaaatcggcagcacacccaagaatcctaataaccattctggcaaaaataaggtcagtgctttacccacaaagaagcttgccgttagtagaataagattgcccaacaaatagcccaacaagacctgccacaaccgatacttcttcaataaaaaaactaacatcaagaaaaaatccaaattgacactcaaaaacgttaacgctaaaaccccataatgcatcatttcacccacttttctttacgcgttgtgctagtatttagcatcaactgtgattaaaacgtgccaagtttagattgttgttcgtcagccggtgcgcgtcctaatccgacctccagggctgggtgacaattgctggaacgcagccgacgtcgatttgagctaacgcataacccgcgtcatctcaaatacgagtcttattctaagccggaagcaacccacttccagctaagaataatttggctactgagcattgtcacccagcccctccagtcgggaagccgctcgaatggctgatgaacggccactgaactcggtacaatttgtcgttggctattttgatactgaaccctttcagttaaatatcagagtgccttctccactttttcgaaatattcaattattactacggtaatttagaaatagtgagttatcacaagactttttcaatctgacagttgattgagaaaactgtcagattgaaaaacaacgacaaattcagcaaaagttgagtacatccctatcagccattcgaacgctatcccgactggaaggtgtttctgacaatgcccaccacgttccggcaattggcagaaatgcctggaggtcggtgtaggacgaattaactaaacaagtttacgctgagtcgaactttcccagcggtccatagctggctgcttttgaacttaaaaacttggcacgttttaatcacgattcatgacaaattggctcgcgcaatgtgtgttctatttagttgccttcattatatgtcaatttcgacatatgtaaagcaaattagcatcaaaggccccacgcacaaaaaacggtaatgaatcccgttctgggcttcattaccgttttactaacagactattttagttaatgactcacaattacttaatcagcggcgagggcatcgattggattcaaccgagcggcgcgccaagctggtaagatggctgctaataaagcaatcaccagggcaatgataaaggtcgagataatattacttacctgaatctcaatcatattgtagctggcgatttggtagaggaccttattcaaggcagctccaataccataagcaattccagtagctagtagtgcactgatgaccccaatgatcaatgattcactcgtgaacaatcgccgaatatcacggcgactttcacccagcgcacgtaagattccgatttctttcttccgggcactgaccgacatgaacatggtcacaatgatcattaacgctgagactagtagggaaattccagcgattgccgccaaaatcgtggttgctaagttaacatacgtattgaccgtatcaagcatgctggcaatactggtggcacggtaaacccgtttgccatcaatctttagcttattaatctgcttggttacagcatcattatgctcccgcgaatcaactttcaccgcaactgaagttggctgcgtacttaaattctttgctgaccgcatatttttcatagtggcgtaggtcacggcgttcacaccacttccagtcgtgctgtccgtgatcccagcaaccgttaattgccgtttaaccgtgacacttttaccactcttattcgttgtctgaaaagccacagtcactttcttaccgaccaattgcttccaattcttagatgaccatttcttcgccacactactcttatcgacgacgatttcattcttaccagccacgtgaccagctttaataatcgacttccggttagaagccgtccacgttgttaacgatgaagcggtgtagtctttattaccaactgtaattgtcgcgttgcttgcactcaaaattggctgaacggtctgaacatgcgcaacttttttcagtttactcagttgggccgtactgaacgttggctgattggtcgtcgtcacactcgctcccatggcagctgcctgctggttgccttcttggctgccgcctcgctgactttgactcgatttttgataccgactcactgtcacgacacggggattgaccatatcattgatttcctgattaatataccccttgaggccattacctaacccgttaaacaacatcactgcgaataaaccaatcgctgtcccaatgataataatcaagttccaagtccaagtatagcgtagatgtttaaacgccgtgttcagtggcacataccacggtaacttacgtgccgcaatctgttggcgattttcatcgaccggataagcgggtttcacccgctcgtcatccgtgattttaccatcagctaagcgcacgattcgagtacccgcattcgcaacatcctgcgaatgtgtcacacaaattacaagccgaccttccgccgcaatctgatccaaaattttcaaaacttccgtggtattttcagaatccaatgcgccagtcggttcatccgcgataataatctgcggatcactcgctaaagcccgggcaatcgcaactcgctgcttctggccaccagataattggttcgggtactttttaatttgatccgctaaccccacctgagttaacagttgcttagctcgttgctcacgttctgaccgatttaacttggtcatatctaacgagatcaggacattgtctaacacggacagatggttgatcaaattatatgattgataaatataaccgactgtttcacgccgatactgatccatctgtttctcttggtgatgatctaacgcggttccttgcaataacacttgtccctgaaattgccgatccaagccaccaatgatattcatcaacgttgacttaccaccgccagattcccctaaaatcgcaacgaattcacctcgttcaaaagttagattaatcccattcaagactgggaaagcttccttgcctaaataataggccttgtgaatatcttttaattctaagtagctcatcctcgctcaccctaccttactgtacgtcaatatcgtgtgccaactcccctttatttatatcaagggctttaactgtgactattagtcattaagtttaccaaaaaaacaactgtggaaaaaatcttataccttatttttattgaatcttatcatagcactttagttagactataacaacaaaaactaactattaggctaaataatttgaaattaattattagggagtgacattacaacctggttcgctctggtacttcaactgacgtcaccaccgttgatcagcgtgcacaaaaggcagtttcgagaaacacaccgttcccagaaactgcctcatccgtgcttacttccaaaattatcgtgccaagttatatttacctaggcgcgtcgcttccgccaccaaaccgcgattgcaccagtcagcatgaggaacacaccgccggcgactgctagccagcgttgcaccgcttcacctgtctgtggtaaccagccgctaccatgatgacctgtcgaatgactgccatgattagtagttgcactcgagctagtttcaggcaataccgtgccactcgtcacccgatccgtgactgtacttgcatgcgaactagctgtaccggccgtcattgaagtgccattgtcgttggtgctcgttttgtctgcacctgatgtattaactgtcccactccccgtggtgctagtttcatgcttgtcgggtttgacagcagtcccgttgccattcggtttagtcgtgttgctaccattttcatccggtttaacggcagtaccgttaccatctggtttagttgtcgtgctgccattttcatccggtttaacggcagtaccattgccatctggtttagttgtcgcgctaccattttcatccggtttaacggcagtaccattgccatctggtttagttgtcgtgctaccattttcatccggtttaacggcagtaccattgccatctggtttagttgtcgtgctgccattttcatccggtttaacggcagtaccattgccatctggtttagttgtcgtgctgccattttcatccggcttgaccgcagtaccattgccatctggtttagtcgtcgtgctgccgttttcgtcgggtttagccgtactcgtcagtggattatcattatccaaatccacaagcacttctgtaccgtcggcagtggcagccattgcttgacttaacatgatggtcttagccgcacgcgtcttacttggtacgagtttaatcgtcaccaggtcagtcacgggttggctggcactgactgttaatcttaattgaccattagcgaccgtctgccgtaaaatctgcacgccggttggaaccttaacgtcagcgacttcccgacctgctaagtccaattgcagatcaaatgccgtcagttgccggttttggttatgagtcaattgaacttttgcttcctgatcattgcgactgagctttaacgtttcaactgaacgtttcttcttcgataggtcagtctgcttaagaaaagccgatgagtcaaagacctgactgtcaaacatctgtggtgtctgtgggacttgcaaagcattcaggatgagcgcactgatatcagcattgcttccaccatgcaaacggcggccattatcgaccgtttcgccaccgagcgccatgaaaatactgcggttatattcatcccaaccaccatgattcttgccagaaccgccatgatcagcgttggcaatgactaacgtatcatgaatgtgaccggttgcttcaagcttatccattactcgcttgaacagcgcatcatattgcgcgtacttatcccagtaattgtcattgtaccagccgtgaccgtgtccctgaccgtccatataatcactttgcatgtagactaacccagtactttgaaattctggcgtgccgatatagttagccacatcatcaaaggatttcagcgaagctgactgtttagtagtcaccgcggcatctggttcaatgatgctattgacgattggtccccattctgagaaagccgcagcgccccgagttggattatcggcttgtaacatcttaaatactgatggaaacattgcttgtggtttgttaaagtctgcaaagtattcttgtcccatggtcgcgttagtcccttgatattccttaggtagcgtgtcccatggccgaccatgtaacatggaaatgtagttttgtgccgaaatcgctggtgaaacggcccgcgctgacgtactcattgcaaactgcttattgaataagtccatcgtatacgtattccgacgtttcttcatgatttctgggttggttgtccatacgggagtcttagttccttgctccgcaccttgtgcatagtacattcccttcggatcccaggggttcccaccaccatcagtcgttaaaacgaccacgtgtttataaggcttgatttcagctgctttggcggctgccactttatcggctgcgtttgccagggccacgtcaccaacaccaataatcccatcaccgttgtaatctagcgcgtacttaccttgaatttcaacagtttgggctggccctagttcaatggttgtatctttagttagctgctcaaacttgatctgcgtctcaccagcggccttagctttcaaattaaggtgcgctaaccgcgtttgcgcatacattttaaattcagcttttgaaaggttcgccgtcgtagtcaggcgaatacggccaggcgcaatcagttggatctgcgtctttcccccttgtaagagacgttctgcaccgacatagtcaaacttagccgcatcatacacgacatccatggtgattggggcggcaccggtagctttaattttccgggcgtgtacattaagaccataaatgtgcccactcgcaattcgcttcgggccaacgagcttcgtcgcaatcgtttggtcgactggtacgggtgcgaccggctgcttgccgacctgtgcttcaacgttcaattgacttacttgttgggacgtcaatgtctgatcgtacaagcgggcctgtctaatttgaccggtcatcattgactgaacgtgacttccaggaaccgcgtcaccacccagcacaaagtctttggttccttgtgccagctttaaatcaccgggcatagccacttgttggactaactggccatccaaatacaagctagccgtcttattcttatcgatcacaccaaccgcatgcacccactgccccttatgtaaggtgcctttaggagtcttatagccggaaccatcatgggcgaagaaaacgacttgattgttttgcaccccaagtcctaaaccaccaccctgttggctagaaaagatctcatgttcaccattggcatcggcggctggatcatatttaaagtacgcctcgatcgccatcccattctgtaactttgcaaactgctgatccgtgaaggtcgtgtaaaacgctgatttgccatccaagttcaacacttggtcgttaaattcagggtccttcgtcacggcaggctgcccataggtttgccactgcgtctgcccaattaaatcaaccaattgttgattttgaactgccaaactcaaggttgctgttggaactgccgggctggcaactggttcggcaacttgctcactcggagtcgccatcggggttactgcagcgacggccggggtcaccgtcgttgttaagattgctgaacaaactaataaggtcgttaaaacacgcggctttatcattataaaattatcactccatcttttttatcgtaaaacaaactgcacttttaagaatagttaaggaatgtaaagtgtttagtcagatgtttgtaaagaaacgatattatttatgttgcgatactttaccagccagaaacttgtcaacgaccccaatcaaaaaagctccccacgtcttgctgggaagcctgataagctaatctattcctgtcgcactaagccgtttgttgatagccatttgcaaccagctgatttctaaaccacgtctcaaacataaaaccataccaaatatcgcctagtaacccgatactcatgacaacttggtcactaaaaaacagctgcgtcaccatatttaacgacagcatgcctaagaatggcaccgccgttttcagtaagaaaaacggggttcgacaccgcacactgaacagcgcataaaaccacgtgaacaacagggcccacacgttaaagtgcccgtacacttgcttggtactggtctcgccattgatagtcttagtaaacgtcatatcatgtctagctcgcttgttaaagccaaaccattctgatggtgcaaagttcatgaaaaccctcctcgtatcctgttcaatcattataagagttaactcactaacttaccactaactatcacgcttgcatgccaaaaaatcgtcgtacctcattagcgtaattaaacttagcgttcagtttgcccaataaggcttggtcatgggtactcgtaaaaccagtccggcgaagatgttcatataagtctaaatatggtaattgttgttcacgcgcaacggtcaactcaaggctaatatcataatcaacttttcgaaaatccacactgattcgacccgcgtcatccaccgttaagattgcatagtgagcacgctgatcagccatgaacttagcgtatggactataaggttggcctgtcgccccgggattaataatgagctggccccgctgactcacccgcataatttgttggtgggtatggccgtaaacggccacatccgcatcaccagctaggtgatcaaaattagactggcgttcatccggatacaggtcgtgaccagtcgagcgttccggctgattatgggccagttgaaaagttaacccgttcacgaccatcgttgtcgcaatgggccgttgcactaattcagcgtaatgcgatttgctcagatgggtcaccagatacgcggtcaatcgtgcaaaataaatctgtgaaggatcatccagtcgcccgtttccagtcatgaccgcattaatcccctgttcccaattaccttgcaaccatactgacggcgcagtgtccgctaaggtctggtagagcttttcggcacccgggccgggtaagaatagatcaccgaggaaccaataatccgtcgcggcttgctgacgcgcatccgccaacacagcattaagcgccgtcaagtttccatgaatatctgccagcacagcaatccggtgttgcatttctcgacacttccttttgcacataatacttctagtatacgctggcaatttacacttgtcgcatgatctctgttaagccagcttattaattggccataacaagcgcagatggtcgtcatcacaactattttcatgtatgctaatagtaatatttagtctaattaataccttggaggaggcattcaacatgcaacaattaacaccattagccgcctattcagacttggcattcgattggtcgatcgttattaatgaagggactgcgggactaacgaccattcgccagcatttagcagccacgcttagcgactgcctggccgcacacgtgaccatcctttgtcgacctgcgatgtttttcctgatcattcacgaccaccggcaaaaggttgcgattcccggtcatatttatcccggtacggcacaaccttatgaaatccaactagacggctggccggtaaataatagcaccgcttttatgacaattattcataaatatcactaagcacttgatactacttatctgtcgttaccacaccaatcgtcgaaagtgctaatatattcagtgttaacaatgcgagcgcttccctccctatgttagaatatactaagaaccaatcaggggggaaatcaaattgcagattgataaacaacaagttggtaatcgtattcaccaacttcgaattgccgctggtttaagtatggccaaacttgcatctgcgattggcttggctggaaaaagcacaattaatgactgggaaaagggacgtacgctagctaacgcggaccgactcgctaaagtagctgcgtactttgacgtatccactaattaccttttatacggtagtttgactgaatatgtcaccgctgtctttcaaaatggtggtctcaatcattcagaattcaatgtcctactatgggaatatgtggacctaactacgaccaatccgaacattctttctagtgacttgttcagttcggcctcacagactgaacagggcgtatccgacccaactaaaatcgcggcgaccttgattacaccgactatcaataatgcgattcggcagattgttcctgaaatcgtccaacactaccaacaaacgacaacctacccagaacctcaagccgtcattcaggccggttgctatgtctttcgtcaccgaatacagattattcggcggacctttacgggtaaatacaaccggatcgtccgcttactagacaatgtcgatttatacgaaaagttacagccagacgatgacttaaaggcgtacttgaatcaaacaacggggcctaaaactcaagttcaaaacggttattcgttggatgaaaagtatcagcgccaaatgaacaaagttatcacagaatttcaccaagcactcaatcgcatcaatgatgcctaccaagctgaactgatggcttgtggacaagggcaggctcattctgcggcagattgagttacttgcaaccgccaatcaaaaatcaactgaacacgaaaacacacttcaaacgtagcagctttgaagtgtgttttcgtatttaacaactgcattgcaattgctagttgaccttgcatcaatcaactatggtgacgcgatgaaattcatactgactcagctcatcgcaaacaattacacacgattagtcccctcatccgtcctacttagcaacaaccgtggcaacttcttggtcgtggctcacttgtccacttgtggataaactgattttttcagcgggttgcccacctttatccacaaccaccaacaccgtcatatcctccccattttcagcagcctgctcttgatccacaaaagcgagtggtgtttctggtgtcacttggtcgccttcatgaacataagttgccggagttgcgctggtattaacacccattcgtaaccgtaccgtcagctttccagctgccagctcgatcgcattttgttccggaatcagggcactgacggttcccgttactggactgaagatatggtggcgttctggtgtcaccgcaaaccccgtctgacccgcagcgactgtggctaaatctatcagtgtgccatcgactggtgcatataatttaacttttttaccaaatgaaaatagtcccatgataaaaccctcccgaatttgatgaatagatttccataatggcgctggccagctaccgttctttgattacctttatcctaactgctcgaacgggtttcaggtcaaggtttttatttaatttgtttgattaatagccattttgaatcagcagccgtcctttaaaattaagcactgccaaagtaacgtccacactacatgcttctctcgcttactcgcctgcacaccctcgcagtaccgtatcgcggccacagccaccaccaaaaaaattccccaccagcaattagccagtgaggaatcgtaacatatataacatcctgagatgcccaccaccaaaacaatctaggatttggttagtgtttgattatcactcggacaagtcccaatcatgttaaagcaaccaccgcacacgttggtgattcacgattgcattgactttcccggttaaatcctaattatctgtcgccgagtaacttttcagctgcttgtaagacattttcaccattcatcatgccatagtcggacatattgatgatatccattggaatcccagccttatcagtcttcttcttcacgtcattcgccatgtagcgaacttgtggtcctaataacaagacatcgggatgcggatcttgactcagttgatggtcaatatcagccgctgaggtggcaaagatcttgtaatcaacaccatcttgctttgccgcagcttccatcttagacactaatagtgaggttgacattcccgcagaacatgccaacataataattttttcagccataattatttaattcctttctataattacatcttttcaatttcagcgttaccagcagcagcttccgcagcggccttttcgccttcttccttcgttaagatagcatcgtacttcttagcgaatgggaagtaaattgcagttgacatgaccaacgtaattgtttgccagatagccatcttccagccaccaatcaggaagccagaaatgattgctggggtcgtccacggtgccgcgaaaccattcaatggtggcacaatgccgaagtagatgaccagataagtggataaggccacgataaccggtgtcaagaagaatggaattgccaagaatgggttcatcacgatcggtaacccgaacaagaatggttcgttaatgttgaataatgctggcacaaattcaactttaccaatcgtcttaaattgaacggacttagcagcaaacaacgtaaagataacaagtccgatcgtaatcccagaaccagttaagttaatgaagttattgtagaattcattagttacaatgtgggcaccttgggcaacggtcaacttacctgctttatataatgaagcattgtcgaacgtgttcggaatcagtaacccactagtaatggcacccatgatcaacccaccatggaccccaaagaaccagaagaatggcactaagaacgcaataaccagcgcaccaccgagtgaatcggataatccttgaagcggtgtttgaagaaccttgtaaataaattgcaacatgtcagtattaccgaaagcactgaaggccgcaaagattaacattgcaacaatcaagatgaccccggcaggaatcatggcagtaaattggttggcaacactggctggtacttgttctggtagggtaatcttccaacctttacgaatcatagcggagtaagcccaaccaactaagataccgacaataatggcagcaatcatcccctgaccacctagccaggtaatattaacaaccccagtaacgggtgcttgcacaaaattttgtaggacctttggtaatttatcgatattctgtgaaacggcgctacctgacatcacgacattcccagcagcattggtaatcccagtaccggctttacccatcgcagctactaatggattggcaatgttaagcgtttgcaaaagcaagaatacggccatggaagttaacccagcgggcagtggttcatacccttcgttacgcacatacacataggcaatcccaacggccgcccaaagtgagagaaccccaaacgttactgtataggcctggttaaagaacgctgcccaaccagaggccttaataacagcagccacagctggaattggaatattagataagatcaagaatacggacccaatgataataaatggtaaggcgtagaccatcccgtcttgtaaggctttaactggtttagtgttaacgaacttcattattggcggtaaaactttgttattaatgaaattgctaacagcaccattactactattttccattacaattcatctccattttttgctaggaccccttgcagccaataatatgacttcttgggaacccgctttaagtcttttagatcatgattactccggttaacgtaaacaactccgtaacgtttttcgatatctgcgtgtgaacttggaatatcaatcaagccccagccgagataacctagtaccttagcgccgtcgatcaacatggcatctttcatcgccttgatatgttcttcatgataagtaatccgctcatcatcttcgatcatatgctggccatcccagtgctcgcgtaacccaatcccattttcaatcgggaacacgggtacttcgtactggtcatacaacttggtaatcaagttgcggaaaccgagtggatcaatcgcccagccccattcattagcttgtaaaaagcggttggcctcaaatgaataattgagataacgattcggaacggcatcaacgggtattttatccccgttgataaccgttgaacgataataactaaaggccaaaaaatccgctttcattttgccaatgattgcttcatcacctggttgcaaatcataatcgatgccctgttgttcaacgtaacgcaggacttctggtgaatagtgcccgtgcacgtaagcgtcattcaagttgttgttcaaaaattcgtcactcttacgagccgccataatatcaattggcttagctgtttctggataaaccggggtgtaagctaacataccaccaatcttcacgtcatcgtagttctgatgaacaaagtcatctaggcgcgcgtgcgctaacatagtatggtggaaaatccggtataagtcgttaacactttgatcacccttggtgtaccctgaaatgttgaagacttcgtcggtaaagtataaattatgttcattgaacacgatccaatatttaacccggtcagcaaagtgggcaatcatcttttcaccaaaacggacgaacgcatcaacggtgtggcgcgacatgaacccgttttcattttcagctaaggctaacggcatatcaaagtgatacaggcaaatcatcggtgtaatcccccgtgccagcatcgcatcaaccagccgatcataaaacgcaatcccagcggcattaaactcaccattaccatctggaactactcgtgaccatgaaatctgaattcgatacatattcaaatgtaagtccttcatcaaatcaaggtcttcctcgtaacgatgatattcatcaatggcatcatgccaatccgaagtggttgctgtcgcaggacgaacatcataaactgaacgacccttaccgtcttcatcccaagcaccctcagtttgcatacttgacactgaattgccccagaaaaaatccttgggcatctgtcgctccttatccatcaaactcctcctctgtgtcatttattttggaaaacgctttcctcgtgaaataatactatcctatttctatttcaaaatcaacacttttactttaaaaatgtatacttttgttaaaataactaagcccggttgccactaaagtagctacaaaaagcggcctggcagtaaatactactgctagaccgttttgatcgtcctatttattcaaatcattcttaaccagtgtatcgacagcggctaataccgcagtatcagctgagcgcgcttgccaccctaacaattgctgggctttttgggtactgacctcgtgattgatgcggatcatcaaactagactcgcgtaattgcccactaaatggggctaacccccgcacaaaccagtctggaatcaaatgtttcgtcaggcttgcagccaactgcggccgttgttcttgaatcaatgttttgaggtcccgcatcgagattggtgtggcggccactgctagaaaacgctgattggccgctgcaggcgccgtcatcgcccgaacttctaagtcagcgacatcgcgaacgtcgatgacattgactttaaggtttggcatcatctgcccagttaatatccgactaactagattataactacccgtgacgtgcccattaagcgatggcccaagcatggcaccggcattaaccgtcgtgaattctggactatcagcatgcgccttgcaatacgcccagccagcctcttcagcaaccaacttcgacttttcatacaatgaaagccccggttggtcttcgcgggtccagtccacttcagtgacgggatgatcatgatccaaacgactgaagccaacggcaccaaggttggcagtcatgacgacccgcttaacaccggccgccgtcgctgcctttagaacacggatcgtgccgaccttggccgcactagtgacctcatcagaagcctgaccttgattaacaaatactggtgccgcaacactcatcacatacgtcacgtcacgcattgcttcggcccaaccctgatcctgtgtcagatccagagcaacaaatgtcaatcgatctaagttaggtgtacccgctagcgtctgcttcacgccagctgctttatctaacgaccgtaacgttgcccgaaccggatagcccgctgttaataattgtttaatgatatgactggctaagaagccattaccgccagtgactaatactaatgatttattcatgtttaattcccccggaatattggttgtttttttcatcatggcttgttaatatagctaatataaaccttagacaacactctaaggcaagtgttaggaggaatctttttgacctatacgattaaagaagtcgctgataaggtcggactaagtgcgtacaccttgcgtttttatgataaacaaggcttacttccctttgtcagtcgcaatgaatccggctaccgagcatttacagacggtgatcttcatctattacatacgattatttgcctcaaaaataccggtatggcaatcagtgctattcgccaatatatcagttatgtcatggcaggtccccaatcgattgcacaacgacgagagctgctgacgactcaccgcaatgccattcttgctcagcaagcccaaatcatgaaaaatctgaaggaagtggattacaaattaaacctatatagtgatccgcacgcgcgtgaattagtgcaaggggaaattgctcaagcgaagtctgaaaaacaagccctcggtttagcagatccatttccagtgacggaataaactgttaaatagccgtgtttgacgccattttcaagcactaaaagccgattatactaaaataatcggctttttttatggctgaattttgggtgatttcacgtcataatgttaattttaggtaagccttaacttggttaacttagcttgtcactgtcccctatcaaccgatttaaccagcctttttcaaagtcacagttcggttacgaagattacaaaagtccgtattcttgtaatctttgcattgcgttcttaaaactcgcgacactaacaagtaacacggaggcgttagactgggttctgttgattgcgaatgacatcgcagttaagatttttgtcagtaacttatttaatcgataatcacaaaatttataggagtgtctaatttgaaaaaacttgtaagtacaatcgtaactacctcagctgcagccgctggtttattattcgccggtgtcctcaatgctaacgccgactcaacttacaccgttaagagcggtgattccgtttgggccatcgcacaaaaattcaacacaactatcaatcatgttgaaacgactaataacatcaagggtcactacatcttacctggtcaaaaactatctattaagacgagttcaaccagttctgataacaacacctcatcaacgacttcaaacacaacgagttcaagtgcttcaacgactagttctagttcaactagcaacacaaccgcgacgaccacttcaacgagttcaactgactccacgacttcaagctacactggtagcaatttgaagagttacgttttaagtcagatgcaatcacggactggtgtctcagcttcgacttggaacacgattattacgcgtgaatccaactggcaaccatacgtccgcaacagttctagtggtgcctacgggttattccagaacatgcacatcagcagtggttctgttgaagaacaagttaacgctgccgttgctttatatgaagcacaaggtatggctgcttgggccctttaatctaaaactattaagacaaagtcgggattccttcccgactttttttgttgcgttaaattactttctataatcaacatccttttaaacttataagaacaataccggtattaactatttaatattgggaatgtcacgttaaacattgtaattgccgctatttttgctaactggctcaactatcggtaatttcagtaattattatattgctatttctgtcatattttttatattagtagccgatatattgtcaccgatacgtcccgtcacgatagtcttcaactattcagtaaaatatttactccccataattttctcagaatctcgcaatcgcttcttaaaattagcgacacatgcgagtaataagtcgccgctatactaatttttgttgatcaacaattgtacgacacgctgattgcttacaaaaaatgggagagtataacttgaaaaaattattaaccacaatcttaacaacatccgctgcaacggttggcctactattggccggaactgtttctgcacacgccgacgcaacttacaccgttaagaagggtgactgtgtctgggcaatttcacaagaatataagacgacgatcgaatcaatcgaaacagccaacaacattcacggccatttaattttaccaggccaacaattacggattccaggggtgaacgcccaggaccttactagtcaagcaccagcgacaccggtcgtttcagcgccagttcagcaggcaccggtcaccacaccaacccagccagctgaaacacaggccgcaactacgactcaaacaacaccagcacaaactaacgagacggttgcttcggcaccagcaactaccccggcaactgaaagctattcgggtgataacctacaaagttacgtgctcggtcaaatgcaagcacggactggtgttgacgccggaacttggaatcacatcatcaatcgtgaatctaactggcagccacacgtcgttaacggcgcaagcggtgcatacggtttattccaaaacatccatattagtggtggttccgttcaacaacaaatcgacgccgcagttaacttgtaccacgcacaaggcatgcaagcctgggccctctattaaaaagacactaaaaaaggctggaattttccagccttttttgccgttcaacgattgttaacaacgcttcaactaaccacgattaacgtgacttgtgccactcgcgacccctaattatgatccgcgtatatcaatttgccgtgttaataatcaccaacacaacttacgtcaagtgggccaaatggtgcgcatagcccaacgcaatcacgataattcccacaatggcactcacttgatagattgggaacagtgtgggccatacccagccgatgccaaccatgccgtaactggcgattaataacaatagtccggtcagccagttgactttcttccagatcactggcgagttgtacgtccagggtacccggataccccaggtcacattctgtggaacatccatacaaattccaccaaccacactggaaagcacgccgagtgtaagcccggaattggccggctgaaaccatatcggaacgactaaaattaggataagataccccaaccaccccattgccagatgatccgtcatcgctatgaagtcaaacggcgtcaacgctaagcgattggtcagccatggggccactaacaagaatagaaaagcgccggtcaagtaaaccaaccctaaccaagtaaactgttgattgcccaattgcaacggctggccgattagtgagcggccccacgcatacatgatgattaacgcgctcatcgtgccaacgatttgtaatctaactggaatcgctgttcgttttgccaattgtgccatcccccttgtattgttaacctaattatagacaggcgccagctacctaccactaatatccggtgttcaggcacatcattgccattatttaggcccctatttcgttagttatccactataattaagactaaactgattaggaggacgttcaatgaccaccatgcaattgattcatccacaatggctgttaataaaatcggggctcaaaacaattgaaatccgtttaaacgatgcaaaacgccaagccttacaagtcggtgacattgtaaatttcatcgatctgacgactgaccagcagctcaccactcagctcatcgacatcacgcgtttcgctagttttgaatccttactgagcgaatacaccgccgttcaagtcggcagtgccccgggaacgccggtaacacagatggttcaagaaatgctaacgttgtattcccccgtccaagttgcgcaatcgggcgtcgtcgccttgcaggtccgtcccttaatcggacaataactggttgagctggcgatactgtgccaacatccactgttgataagtcaacttagctggcatggtttcagtcacattcaacactggcacctgattcttcttggctaatgacaccatgttagtcactaatttatcactaacttggctgttattcacaaagaaggcgacttgccgactctttaatgcctgctgcatcttgtggataacttgcggtgctgggtcagtgcccttctcaatcgcattttcaaagtcttgattagcaaccttaaaccctaaactggtcaatgcgtaatcaaagacgggctcactgactaacacttgccgattctttaacttgttagccttcgctcgtaacttggcctgttcctgttgaatcggtttaagcgtggcgatgtacttgcgggcgttggccttaaaatacgtgcgatactggggttgctttttagctaactgattagcgagatagttcgcggtggcgggcatcgttgcactgtcataccagagatgctcgttagccccttccttgcgatgcatcacgtcctcgccgacccgaatcaatttggctcgttgcgtcgagtgcacgaccttgttcatccagccatcatagccgatgccattagcgatgacgagatcagcctgaccaaccgtcttagccacggttggtgttggctcaaaatcatggggatcaacggacggtttgttgataattgacgtcacgctgacgtgcttgccaccgacagcttttgccacactaccataaaaattcgtcgtcgcaacaatgttgaccttatgcgattcagcagtcgttgacttagactgacagcccgttaacaagcccccaccaataacaagtccacctagtaatagccacaaacgtttcacaattgccactccctttttaaatagtaatcattacgttttaaagaatagcaataaatgccattcttgtaaatagtaatatttacgttttacaattttattcgttaggagtttcttatgaaaaaaattctgattccgattatcactgttcttattatcggtaccattgttggtctcagcaccctacaccgcaccccgcgagccaccacaactacggttcacaaatcacgcgttatccaacaaccacaaccgattaccgaaacgaccattgctaaacagcctgctttaaaatacagctgcattatttattacgcaatcaagcacttaaagattcagcgttggcaagaagttagtgatttcagcttgggttggcaggtcgaaatttacactgaccaggggcaaactaagtatctggtttggtctgataaacacattaaggcagatgccaagcaactccagccgaactggttcacactcaaaaatgaccatgtcacttatgacagctttggtgttcatacttttaaaaaagatctgactgccacagtcagtatgaggaccattctagctcagatcaagcgtgaccacgcgacgaaaaccgttcgccacatgccaactaaccttgtaatcaaagatcatcgttgaacacgctttaagttaacttttccattctcaggaggattggaaaagttttttttatccacgtgttttccgacccatttaccgtatttagttagtgtctactaattgatttggaaatgaggcttgtttaatgattaccaactggtttgatgatgatccactattcaatcgttactatccgtacgatgccggctaccggtattactttgaacacgaatggggtatcccggttcagcgcgatgaacaattatttgagtttctgagtcttggcggttttgccgctggtctcaactgggccgtcgtgttcaataaacgctcagcattcagcgcagcatttgacgcctggcaaattgaggtggtggcagcgtatcgcccagaacaaatcaccggtctcctcagcaattcggccatcatacgaaaccgtcgtaaaatcgaagccgtgattcacaacgctcgcctgattcaacaaattcggaccacacagtcttttaaagactatctctggcaacaattgggccatcaacaattaattatccagccccagtattatgatgaactcccacgcacaacaattactggcgatcgcatcgcacagcacttacaacaagttggttttaaatttgtcggtccgataacgattaatgcttggttggtaaacaccggttttattacggcacgtcccgaccaactgggcattattacgacgactccccggccttcgtcaacgatgctgcccccacgctcaccgcaccaactcgggcattttaagccttaacccaggcttgttgcgctgctttaattgccgttcggcgtatctagcgcgaggcccgctgattttccctgataataacggctaaaaagccaattaaagtccataatcacagtcgctatttagcagttaaagggatatacttataccggcgtcatttaattcgaaccaacgcagtttttgcgatttgaaaggtgtttgcgtatgacttggtcacattgggagataactccatttattacaagtgtttttttcatcctaggcgtgctgacccttttttgggtatcacaaaattggattatcaacttcttcaatactcatcattggcgggttgaccaatcgcttattaccgactggtacggcttaatctacatgatgttatttgtctttgggatgcaaactgccgttgtgggccagaacgacgcctggattttcatgaatttccagctcatcgggctaaccttttgtggctactttctcaatgtacgtgtccgctattactacttgtacccgcttgtctttatctttatgggcttcaatcactccttgtattactgggagtcgtgggggcacgccgtcacactgatcctcttctttacggcgctcggccgattgcgtaaacacgtcccactccaaacgaaacagggacaagtcgcactttatttagtcacttgtgctggttttggggccgttctctggtggttcatgaagcttaagttcaacttatcatgggcaacttattggcaagaatggacctacctactcgtctttgcttccttgctctatatctacgccagcatgttgtcagccaatgcacacctcaaacagaatctggtcgcattcgctaatcacgacgctctgaccaaaatcgaaaattttgcagcttacaaaacagccattaattatcaggttacaagcagtcggaaaaacggctcacaattgaccatgctgatgtttgacatcgaccacttcaaacaagtcaacgacacttatggtcacttggctggcgacaaaattcttcagcacgtcgcccaagtagctacgattgtctttcatgctaataatccgcaaatctcactatatcgaaccggtggcgaggaatttaacgttatcttccccaactatgatttaaccgaagcacttgcggtcgctgaacaactatttgcggccatcaatcatatcgctgtaccagttaatgatcatcaaatccaactgtcgatctcgattggcctatcagaattagcagctgatgaccaatcaccaacggccttttatcagcgcgtcgacgccaatctatatcattctaaaaagcacggacgaatgcaaatcaccgcgaaataaaataatcattaatcttaaaaggacggttctaacgactaattttagtcattgaaaccgtccttaattaagattaattcgctatagaaacgctacggatattggccatcgcaatacttgctggtgccgttagataaatccgggcttgatgccaatcgagcttcaccaactggctggttgccgtctgataatagccaacggtatcgttaaaataatcgacgttgagcaatggtagttttggtaacgctgcaatctgtttcaactgggtcgccacagctcttttatcctgagcatttggatagtgtttatgggcatagattgcagcgtgtttttcaatcaagtcatgataaccagtcaacgccgcgaacggcgcaaattgggcagcacggtctgcttggggcattggtaaatgccttgaagtaggtcgcgagcactctaaaatatccgcatagcgactcgtatcattaaataacgcagtagtactggcttcctttgtcattaggcacgatgtcccccaatctgctcattacgttcaatcgtagttgaactcggttttagatctgccaagcgaatgacgacattcttattcccggaacgacgttgtaatttcaaaatggcgcgttgcaattgcccatcgcgttcacgtttgcgttgtgcgtctcgttcttgcgcttgggccacttctggattttcaaataagttagtttgttgataccgaggttggcgcctaacctgctgttcgtcgaccaaatggttcgccataacggtcacacgtcgaaccatcaattgacgattaacgacttgttgataaagctgttgatacgcagcccctagctcgtgttgtgaagcactcgcctgcgctaatgtcaccgtggtatgggcgggctttggtacttgtcgcccatagtagtcttcggtgaccgcaccctgataatgcgtgccaactgacgaagcattagcatcgtaatcaatacgaattcccaactgatctgtcaccacgtggcgagcaaccagttcgagtgtcaaattattcaccatgccgcgtaacacggcctgcccttcagtataagtatacggtcgcatcaacacttgactggcatatataccatgttcgctagcatggtaatttttgatgtcagcaattgttgccgactcatcgccccacgcatgatcaattaacagttccgcgtttttaccaaactcacgatataattgttcttcattatgagaatccgacaaggttcctagtgaacagcgcgcaatgtcacccatcgtattgagccccagggctgccaaccgcttagcatagccatgaccgactcgccaaaaatcagtcaacggctcgtgcgcccataagtattgccgatattgctgctcatccatctgtgcaatccgaacaccgtcagcgtcagcgggaatcttcttggcaacaatatccatcgccaccttagctaagtaaagattagcaccaatcccagccgtcgccgtaatcccagtctcggcctgaatctcgtgaatcatcgtctttgccagtgcgtgcggtgaaacctgaaaagtacttaagtagtctgtgacgtccatgaagacttcatcaatcgagtacacgtgaatgtgttctggcttaatgaagcgcaaatagatatcataaatcgcagcactcttctgcatgtaataactcattcgtgggggaacgacccgataatcgatacccaaattagcatgcttgaggagctgatcacgataaattgagcgatgccgccgaaccgcctgataggaagtctgacgaccacgggcgcgatttaaagttgcgacccgttgttcaacttgaaataaccggggtcgccctggaacaccaaattgctttagtgctggcgaaaccgccaaacaaatcgtcttatcagtgcgactcgtatcagcgacaaccaaattggcattcaatgggtcgagttgatgagcaacgcattcgactgaggcatagaatgattttaaatcaattgccatgtatgttcgctgttccatcaatataatgactcccttccaattaatcggcacaatcgcagtcgttgttcaccttaacattttgctggtaatccaaagtaaatctcatgctgctgatcgaattttaacgatagccgcatgtcgctcgcccccatgacactcacttttggatgaaacctgactcaataatttgtcgttaaaagaacatatgttcttttaactaattataaattaaaatcaggttgaatgccagcatccgttaacaaataattgcaagtttcaaattagacttaagccccgaaaaggcacccgttcaccagcacgtaccgtgaccacgaacagttgcctttttaatgtcattttatgagtggctctgcgtttcagtcgggaccaacttcgtaaattcatgtagaaaatctgccgtcttcttacccgggaacttggtgcttaataggccatacggtactgtcacggacgttttcagcggtactgtaactaaattcggatgaattcttttccacggcgtaagcgaaatcattgcgatattctcctcaacggtctcattaaacgtattgatgtcataacgcccgctagtatcaattggctgaatactaggttctgccgccaacatttcactccgaaccagatcatttttctcactaattcccgttgacaccatcagaactttacgatgcgcaaggtcactgtacgtgatttcatccaactgggctaatggattatcactacggacagcaattccaaagtgatacgctcccaactttatcgcactaaaggactgcttcaaagttgtgctatcgaacgtcccaacgattaaatcactactccgaccaagcatcgcatactcacgatttctcgaattcaagtcttcctgcaattgaactaatctaatctgaaatttaggcatttttggtgccagttctttccataatgacatgaaggcatcagcaggatgtagtaaggaagttcccaacaaaatcagttgcttatcgtctgaacggacccgtcgcgtctcttcaatggccgtgtttagtaaatcgagcaactgttgcacatacggttggaacttcttaccctgtggtgtgagttggaccccggtcgcagttcggacgaatagttttaggttaagctccgcttccagccggttgatctgtttcatcaccgcagtacccgatataaaactctgttcccccgccttcgtaaaactaccatactcactaactcgtaaaaacgtctgtaattgattaaaatccacaacggtcacctcctagccttctagtataaactaaaagttaatactaagctaactaacggattcttctcaggaggcacgttgctggctatactagtcattgtagttgaggcacagcacatcagaaacgagatgattaattgaacaaaaagtttatgcaaactatttttcaaattatttttaccgtcgctgcacttgtcgtcatcgtctatgcagttcagcaacactcaccaaccaccgacaagtctaaccaagccaccaagcaacagacaagtgttacccattcggacaactcgcatctgaccgaagcggatgtcgttggtgtttggatcaatcaccacaacaaagatattcaccaacaaatcactttcactgcggatcacaagtggaaggagaaccaacatcacgtcactaatatttattccggtacttggaaaattattgggcacaatcaaatttcactatcaccctatggtgaaaaaatccagctttccggtcatgatttttccacaatggacgtcttaaattaccatcacattttaaataaacaaaaaaattaatcaggaggaaacaaatatgtcagtaaaaaacaaagttatcgttattacaggagcctcatcgggtattggcgaagcaagtgccaaattgttagccagccatggtgccaaagttgttttaggtgcacggcgtgaacaacgcctacagaaattagccaataaaatccagcaacaaggtgggcaagccacttaccgcgtaacggacgtgactaagcctgaagacttaacagcgttagttgctttagcaaagcgagaatttggcggtattgatgtcattttcaataatgccggtatcatgccgacttcaccaatcagtgcactaaaaactgatgaatggaatgccatgatcgatgtgaacttaaaaggtgttttgaacggtgtcgccgcagtaatgcctgatttcaccaatcaaaagtatggtcaaatcattacgacatcttcagtagctgggcttaagagtttcgctggttccggcatctatggtgcaactaaatttgcagtacgcaatttaatggaagtaatccgcatggaaagtgctcaagaacacaccaatattcggaccaccagcctctatccggcagctatcaacactgaattattgcacaccattaccgataccaatgctaagcaaggtatgaataaattatatgcatccgtcggtatcaccccagatgcagtggcccgtgtcgttgacttcgcagttgcacaaccagatgacgtcaacgtcaatgaatttaccatttacccgacaaagcaaggctaatcgatgacgacaatccacgatcaatattagaaagaagcgattcatgaatggaacggtctatcaataaagcgacgatttatcacagtctagttttaagcctaataatcattcagttactaagcttaattgtccccgtcaacttgacgctattaaatgccgtgcttgcaatcggggtctcaattctcggaattcaaagcttaagccgctcttttcaagtcgcgacattgatctttttcattgctgggttgggactactaagtactacgggtttatcaatcaacggtctagccatggcaatcacttcaatggtcgatatcgtggtgttactagttgttatgcaacttttcttaatccctgtcaccattggcaactaccaagctactgtcgaagcattcatgcaaaagcacattcgtggccccaaacaaaccttcacctttgtcatgattgtcacgcacctactatcaagtattctctccatggggaccgttgccattgtcctatcaattctaggcgacagtatcaagcgccaagtcaaagacgccacccgtttttcggcaacagccgtaacccgtggatttacgctcggcacattatgggcacctggagcagcaacaatctttctaatcagtaccgttactaaagtcgggtggacccaattattcataccatgcctgattttaggcctgttaggattattgctagcgtatttgatggaatataaccaaccgtatatgcggattcagcccgtgacaaccaatactaagcagcagactcgttttaccgaacacgcatcacttgtcagtttagtggcggccgttattgccctactaatactcagctttgttttaatggaaagcaaagtcgtaagttcaatgaacgctgttacactttccggtttactaattgtcctgatttgggtcacggcattagggctcaagccgactacgggccaaacagccttcaaatttgcactaaaaaaagctagccttgattattggcaacacggaattgcaagcggtgcagcgcttgcgccgttctttgttggaatcggcacgttcacgtacggttttcaacattccactatcagtagcgaactaacccacgcgttagcaccaagctttgctcaccttggctggttattggtcgttttaattcccattattgtcgtattggtttccctaattggcattcacccactagcatcagtagcactaattggcaagattattatgaccatgcacattgccctttcaccactattaatcgcattgagtctgaatatcggaagcgtcgttgcatacatgttatcaccgtttgcaggtatcgtcatgattgtcgcgaccctgttacatgtcagctcagcaactgtctcggtacgttggaattggcaattttgcctcatcttcctcgtacttagtttgggcgtagcaactttattaagtcttattttttaaaagagaggttcttacaatgaaaaaagttattttattaggtgctaccagtaacatttcaaaatatttaattccacgcctacttgcaaaaaacgatgttaaactcacactatttgctcgtcaagctactcgacggcttcatcagtacgccgcccaatcgcaggttactctcacgaacggcaattggaataattccgctgatcttacggcggcaatcgcgggtcaagatatcgtttacttggcaacggggcatttcaccaccgccaatcaaaatgttgtcgatgcgatgaagcaaaatagtgttgagcgcctaattgtcgcaggtggtttaggcatttacgatgaagtcgctggtaaatttggtatttggaatgcccaaatgatgggtgattatactgaaatcaagcgagctgctgccgtgattgataatagtggactgaactatacatttttaagaatggcctggctatataataatgaccagcatacggactacaaggtcattcctcaggggatgccattcaaagatacgcaggtgacacgccaagccgttgctgacctgattactgaaattattcacaatccccaattatatcagcgaagtagcattggcgtcgctgaacccaatactgcttggaacaaacctggtttttactaggaggtcggtttaatgcaaattaaagttgatttagacgatggctttttaccactaatctataccagtaacgcgaacgtcaaacactcaggccaaccgattctattgtttccaattgaaatcaaatcaattcctgcaataacgactgcgtttgctatttcgctcattgattacgacgccgtcccacgaacgggttttccgttcattcactggctcgcgaccaatattcctgtcatggcagaaatcccagccgatttcagtcgtaattttgagggcccccaaggtcaaaactcatggatgtcacgcttttatcagttaaacgattcgtatttcgccgatcactatgccggaccgaatccacctgatcagcctcatcgatatacactatccgtatttgcactcaagcacaacttgccgttgaataaccgcttctattacaacgacttccgtgaacaactagtgggaaacgtactaacaaaagccgagcttcaaattttagcccacaattaattttaaatgaaaggtgtttttaacaatgaacaataatgaaaatagcgtccaacacggcatttttgcaatgggagatttaaacgttgcttttcaacaatactttaccggtaaaagttaccacaacgctctagtgaaagacgagcaagtcaacgtaactgtcagcaacgtcagctttgaacccggagcccgtaacaactggcatatccatcacaatggctatcaaatcttattagtcactggtggcgaaggctggtaccaagaagccgggcaaccggcacagcgattacatcctggtgatgtggtgagcacccatgacggtatcaaacactggcacggtgctactaaagatagttggttcagtcacattgccatcactgcaggcacaccagaatggctatcacccgttagtaatgacgaatataacgcattggcttaggaggtactagataatgaagaaaatgaagataacagccaacgaccgccacttcacagcaaatttggaagaaaatgccaccaccgcagcgttactttcacaactaccactaacactgccgatgctcaacctttataaccgtgaattgacgtatcgttttcagcaggcactccctgctaacggggcacacactactggctatgcagttggtgatatcgcctactggacaccgcgacacagcttagtgattttttatgagcaaactggcgaagtgattagtaaccttcaaaaaattggtcacattaatgctggcgatttgaaacaattccgttcatcaagaaatattaaaatgcagtttgaagaagattaattaaggagagaaagtcatgttcaattttacagataaagtcgttattgttacaggtgcacgcacgggaatcggcctgagtgctgccactctattcgccaaagcaggtgctcacgtcattttagctggccatcatgaacctaaagacgaagcccaacagctagtcgatcatggctactcagccgtttcattcaagtgtaacgtcgctgatcccaaagacgtcgccggaatggtgaaattcgcagttgctcagtttgggcacctcgactatgcttataacgatgctgggattcaaagtccagtcaccgataccgccgatctatcggttgaagaatatgatcatgtcatggatactaacttaaaaggcatgtttctcagtatgaagtacgaattacgacagatgcgtgctcagggaacaccagccgcaatcgtaaactgttcttcaatgggtggtctcgttggtattgctgatcgaactgcctaccacgcttcaaagcacggcgtcttaggcctgacaaagagtagcgccttagaatacgctgaccggaatgttcggatcaacgccgtgtgtccaggaatcattgatacaccaatggttgcccgaatggatgatactgaacgacaggagatggacgacctaatccgcgaaattcccatggggcgtttagctaaaccagaagaagtcgctcaagtcgtactctttctttgcagtgatgctgccagttatatggttggtcaagccgtcgctgttgacggtggttacactattcactaatacgaggaggatcagaatgaccaaggttttaattttaggggctaacggtcgaattgcgcggattgtggaacaacgcctcttagccgaaactgacgtccagttgacactagtcttaagaaatgcagggcgcctactagtcacttcaccagaacgagaaacggttattcaaggtgatgtcagtgattcacagctactagacactgttatgcctaatcaggatatcgtctatgcaaatctagccgggaatatggcattattggcacagaccattatcacgtcaatgaatcgcaatcatgtgccccatcttatttgggtcacaggatccggactctaccacgaaacccctaatccatttggcgcttgggtcgaacaggtagtcggtcacgctgctaaaaacgatacgcgacatgcggccagaataattgaatcatcggatattcctgctacaattattcgtgcggcctatatgaccgacgataccaaaattgactatgaactgacttacaaaggtgaacgcttcaaaggaaccatgatttcacgcgctagtattgctgatttaatcatgaagattattgctgagccaacagcatacgaaaataccagccttggtattgctcaaccgggcactgataacatgttgccacaagtcaaattgatggctcagcatcgctaaatgtgaacatttaaaagtaatcaattacacctaacccgcttcaacaatcatccataattaataaaactggctgctagacactttaaaccgtgtctagcagccagttttatctgattcaattattattaatatactcagccaccgtttcaaaacaacgtggcacttattgccctgccgtactttcctgctccaacttaatcgtcaacaattccgggtcttcattgactaacgcttgtagacgtgaaaatagcatcagcaaccagccaaacgaaatcgcaaaggcttgaatctcaaatgccgtcagcgatggatacccaaaccagcgaaaaccaaagttgagtagtaatagcaccacgccaacgccgtatgagagccacagaaaatctttcgtcacggctggtaatagccaccgcacccccacaatcaacaagactaacaacgtgaccaagccaccagcaactaagtcatgtaaccagtgaaacgtcaggttgttaggaaatagcccgaccgccccgaaatcgacagcggtcaacgtcaacaatatccgcaaggttgacgttcgccaagtacgcggataaattcgactaagtgaaacaaatagatagtcaatcagaacgaccatcaataacgccgaaaaaatcagtgtcaagttgaattgccaggcattttcagcggcatgcgtccctaaaaagcttaaattatgctgccaccatcgccgttgaccattggcggccattgagataacacagccactgacaatcaccaccgttaaaatcgttgataacgaccgcgcatttatcgtcaacgcagcgctaatcatgaacgcatccgcaaaatacgtaaacaggaccagtagcaacatagatgtaaagcgatcgaagatgacatctggaaataataattctaatacccagaaagccccgaccagcgcaaaggctaagatcataataaacgcaatcgtaataactggaaagttccgccaataaatatggcgcgaaaatcgattttctggatcattacgcgtttttaagaaaaagccgacaaatagcactgcgccggtaaccacaccggccacaatcgtcaaactcccgattgattgcgcacctgtcagtggaactggtcgcactttttgaaaccaccagtacccgtaactggctaaccccgataggattgcaaccaacagcggccagattatcaagtattgctgccactgtggttgacgtggcttaatcttctctaagactagtgcgtcattgcgcacctttaactgtaactgatcatcgcgatcaatcccggctcgttttaatgctgagactgggattgaaacccgcacttgttgctcttgccctgccatgtccgactccttatactttcattactcaaagaccatctgattacgatacagttccgcatagaagccgtttgccgctaataaatcatggtggttcccctgttcaataatttgaccatccttcaatacaacgattttatcggcattcaggattgttttcaagcggtgagcaatgacaaagctggttcgcccttggatgacgttgtccattgcggcttgaatattggcttccgtcaccgtatcaacgttcgaagtcgcttcatccaaaatcagcaacttgggatttgttaaaatcgtccgggcaattgacatcaactgcttttgaccagcagaaaaaatactctgttcgtcggaaacgcgcgtctgatagccatctggcaggctcatcacaaagtcatgaatattagcctgcttcgccgcatcgatgacccgatccatactagccgttgggtccccgtaacgaatattatccgcaatcgtgcccgtaaacaactggggttcctgtaagacaatcccgacattttgccgtagcacctggagatcaaagtcttgaatattcaccccatcaaacgtaatcgcaccactatcaacatcatagaagcgattcaacaaattcatgaccgtcgttttccccgaaccagttgggccaacgagtgccaccatctcaccgcggtgcacatggatcgacacgccatgcaagatttctttacctggtaagtaactaaagcgcacattatcaatcagtaattcatcatgaatcccgtcgagcgcttgaccgttagcggggctcacttcatccggttgattacggacttcatcgacccgccgtgcaccagtaatcgctaactgaatcatactatataaactagtcaatgacataattggctggtagtactgttgggcgtagttaacgaacaccacgaccagcgccaaagctgctccagtcgacatactcccattcagcgctaaccatgagccaaagaagatgacaattgccgtgttaagcagtgacatcccttgcatcagtggattcaaaatacctgaccagatttgacccgtcaacgctgactggcgaaccttaccattatactgatgaaagcctttcaaggagtcctgctgtaagccgttggtaatcaagactttttgaccggtaatttgttcattgatataaccattcagttgaccgatatcatcctgttgttggttcaccgcgacgccagccttgtgcatgacaaacgccgcgataattaatgcaaccggcgtagaagccatcgtcacccacgccatcgtagtattttgattaaacatcacaattagcaggccaacaaactgagccacggctaataaaatttctagcaaggcttgattcatggcattaaaaatattatctaggtcagaggtgaaccgagccagaatatccccgtcactatgcgtatcaaagtattgaaccttcatccgttgcatcttccgaaataggcctacccgcattgtcccggtcgaaaaggccgtcacgcgtgctaagatcaagctcgcaataaaaatcgtgctagcatcaccgacatacaacaagacgtagatgatcagggtccggttgaacggttgcaagcttgcttgtgcccgagtcgcttgattcgtccactgctgcaagtactgcgtcagctcctccacggctcgtcccagataagtcggtgcgaccacaatgcaccaagtcgaaaaggcaatcagaatcacacttagtaagaagcctaaccagtagcgttttaaatagtgccagtaatatttaccagcattgcgtaaatcactcatgtaagccctcctcccgtgctttttgcgtttggtaaatagcgcgataaatcgcactatcttgaagcaattcgtggtgagtcccctggcccgaaatgcgaccattatctaacactaagatttgatccgcacgaataattgaagcaattttttcggcaatgaccacggtcgtcgttgacttcaactcgcgatccaaagcttcctgaacaagtttttctgaacgcgcatcgagtgccgaagtcgcatcatctaaaatcaagatttctggattggcaatcacgccacgcgtaatcgctagtcgctgcttctgaccacccgaaaagttctgtgaccgttcttccacgggggcatcgtacgtctgtggcaaccgttcaatgaattccgcagactgcgcaatattagccgcccattgcatgtgactaggctgggcgtccggcttaacttgccgtaagttacccgcaatcgtgccagaaaataacgtggaccgttgtaagacataggccaccgtggatcgaagggctttttctggtaaggcccgcacatcaattccaccgatggagaccgtcccactatccggatcatacaagcgcgcaatcagctgggccaacgtcgtcttaccagatccagtggccccaacgattcccagcatggaccctgcttttaccgtaaaggtcacatcttttagcgttggttgcgcatctcccggataagtgaaggttacgtggtcaaagtgaatatcaccagctacgggcgccgcgtcgccatcaacgtaggtcatacttggttcggtagtcatcacttcgccgattcgaccaagtgagatgacggcccgcgacgcaaaagtcatgagaaatcccccgttgatcacggcaaataaaatctgcattaaataagaaataaaactcgtaatagctgctaaataggccgggtgcgtcgtaatcgtttgaccgaccaagtaaacggcgaccccgaccgccacgttggccgtcaaaaagaacgctggcattagaatagcgaaccagtacccaattttagcggtcacagcggttaattcatcggatgcggccgaaaactttttgatctcgtttggttcttgaacaaacgatttaacaacccgaatccccattaagttttcgcgggcaaccgtattgacgttttcaatatcttgttgcgtttgtgcaaagtatttagtcattcgccgaaccgcaatcagtgcgacccctaagatgaccgccatcatgacaacaatgacccaccactgctcaggcatcgtcatcacagcgagaatcagtgccccgatgaatagtaatggaatccgggtaatctgctgaaagccagccatcacaatctgttggacttgattaatatcgttcgtcattcgtaccactaagttggacggtgaaaatttttccacgtcagcgtaggctaatgactggaccttagcgtataggtcagctcgcaagtcggtcgccacaccaagggccacccgggctgcgtatatcgtattcacgatcccaccaatgatccccagtacggccaagccaagcaacatcagtccttcacggaataccgtagcctgatcattcttgataatagcttccataatgacttgcaataatcgcggttgccataacgtcgcaaacactaagacgatgaccgacaacatcgcaatccagacgtctagtcgataccgcttaaaatatggcatcaaaatcttcatcaatcgttcctcctcataattgtggtctccctgtttagggtacctgaaattaacagtcaggacaatcaatatatcatatcttttgcaaaaacagattacgatgataataattcagtatgtgtgggagcaatatctttcctccgctctgataaattatgtaaagatacaaattgatttatataaagcgcttaaaaattagtataagttatttactatacagtatttttttcacggaacatccaagatgatataatacttgtactaaataaatacaaatcgcattatgccttctgtatttataaacatcaattttcatctcgagaaaaaattgatactacctgtcgtttaatattgcaaatatttgcccgccgttcaattcatttcatctataagaaatatcgttaaaagggggaacttacaatgcgctttccaaaaagaatctgttcaacacttgcgacgatttccttgacaactagttttggacttctaagtgccaacgcatcaacaaaagctaccactccgatgttaggttatcgatatgataaacaagcggcaaactatcaagatttatcatcctccgactactataaagatgtatggaacaacgcaactgcttcttggaaaaaggctggttttacgtggacgaaagcagctacagcaaaaaccaccgtttcttcgtatgatggaagttctgacatgactctggccggctacaattcagtttcctataataaatctactggcgaaatcacttcaagcaaagttcgcatcaaccgagcggtatttgaaaaatataattataccaaagcagaacgtaccaatgttgcagagcatgaattaggtcatgctctgggaattgggcacaataatactgatagtgtatctgtaatgaatccagcaaaccggtactatactattcaagcctgcgatattaatggtatgaaggctcgttatgccacgactaccacttttgatagtgttccaaataatcccggagaaatcatcactgtaaccgaatatcttcatgtacaacctaagattacaaatatcacaactaattacagttcacaatcacactccttgatactaaagggtcgcgcgattggaatcgaacacctcacgctaacttatcaaggcaaaaaagttcgaaccgtcaacgtcaaatcaggacaattcaagtttgcacagcagtttaagggctacggagatttcaaattaatgaaagggcaacaggtgctagccacaattccgtcccaacaatacgcaaccccaaaggttaaagtcactagtgccgagcgaacaaccaaaggtatctattacacgcttatcggttctcgagatgcaaccatcaatattgcacaaaacggtcaagtaattaaaaccatcaagaacgcaagtgcgactacaaaagtatttattccaaatgcaaaaatcaaaaatagcacccgtggcttaactgtcacgcagagagttacgaataaaaaaaccagtcaggcagttcaattaccacctttaaaggttaatatcaaacaggtgacgaacttctaagctttcacaaaagcgccttcaacgttgttattaagaaacactatatgtttgaatcgactaaaaaatagccgctccaagaattgcagacacgattcttggagcggctatctaatatcttactaggacatgagcaatgcagaatattccttttagttattatccactacttaaaaaagcgtccgaaaattccatagttacattgatacctattaaccgccatttcatgctaagctaaagattagtgcagtactatcatctctcagctatatttataatatactcgcttctagcatcagaaaggaagattctaatgacccttcaagcacaactcatgcaacaactcacggcggcggaaccggaaatgatcaagattcgtcgccacttacacgcccaccccgagatttcatttcatgaagaacaaaccgcagcttacatcaaagcgttctatcgtgaactgggcgtctcaaccactgcttatggtgatgggtacggcttcgtcgtcgacatcgatagcggtcaccctggacctcagttagcattacgcgctgattttgacggcctcgcgattcaagaagacaaccacttatcatttaaatcgcaaaacgccaatgtcatgcacgcctgtggtcacgatggtcatactgcttatctcatggtactggcgaagaccttactcggactgaaaaatcagctacgtggtcgcgtccgcattatccaccaacccgctgaagaagtatcaccgggtggtgctaaggggatgttggctgctggcgtcctagacggcatcgataacgtcattgggctgcatgtgatgagtaccatgccgacgggctcgatcgcctatcacttaaatgcgacgcagaccgggcgggctaactttacggtcaccttcacgggtaagggtgggcacgcctcgatgccccacctctcaaacgatgcaatcgttgctggaagttactttgtgaccgccttacaaaccgttgtttcccgccggattgacccatttgataccggcagtgtcaccatcggctcattcgacggcgtcggttccttcaatgcgatcaaagcgcaagtcaccctcaagggcgatgtacggattatggacgaaaccacgcgccagaccatccgtgaccagattactaaaattgcgaacggcgtcggggcgactttcggtgtccaagttgcacttgattacgatgataattatccggtactcatgaatgatgcaaccctgacacagcgcgtcatcaccagtattcaagccgctcaaatcccagaaatcactaaaattttcgactgcggcccccaagacccctcggaggacttcgcctattttgcacaagccaaacccagcacctttatctatgccggctgtcaaacagctccgggtgagacccacccgcaccacagccctgattttatgatgaatgaagactgtttactaattgcagccaaagcggtgggaacggcagcgctggactacttaatgaacgcctcatcagatcattaaacacactaaagtggctaccttgaatgcatccatccaaggtagccacttatgatttattcaagccaaccaggaattaacttgcagtgaacacctaattaatcacgccgccaccagtcacgccataaatttgcgcggtcacatagctcgcgtcgttagaagctaaaaagacgtacactggtgctagttctgcgggttgtcccgctcgtttaagcaaggtatcttggccaaacttcggcagcgcctcgattggctggccttgatctaattgtaggggcgtccagattggcccgggagcaacgccattgacccgaatccccttttcggccgcttcggctgctaaattaatcgtaaagttcttgatggccgccttagtcgcagcataatctaatagatgaccactcggcgcataggcttgaatcgaagtcgtggtgacgatgctactgccagcgggcatctttggcaaggccgcctgagctaacgcaaacatcgcgacgatattcacttcgaaggtcgcacgcacctgttcgatcggcagcttagccagtgaaggttgtgaaatctgttgtcccgcatttaggacaagggtgtcgataccaccaaattcagcgattgtccggtccacgaggtcggtcacaacgtcaacatccttgaaatcacaaggtaataataacgcttgacggcccgcagcgcgcactagttcggcaaccgcctcagcatccggctcctctcccggcaagtactgaatcgcaacatcagcaccttcccgcgcaaaagcaatcgcggtagcccggccaattcccgaatcaccacccgtgatcaaaacgcgtcgattcaacaacttatcatgtccttggtaactcttctcaccacaatcaggttcaggacgcatcttagcttgtagtgcgggtgtctcctgatcctgcttatcaaagccatctgtcttatataaatagcgtgggtcacgtaattctggttgattcatgagatttcctccttcaaaagaatacccatagaataccggaattagttttcggatgatagttaaacgcacactaaataataatagttacgattagatattaggcataaaagctgtcatcgtcttaactcacttaaattgacgctgcttcaaaaaacgataggcaattattccaacaacgccgatcaaagtggcccgtaataaccaactgacagaccaccacgtcactaacacttttattaacgtcatcccatcattaatcgtcattcggctgttcctccgctaatgttgccaattgacccaacttccgctgaaagtctcgttgcatgacgggcttcactagtggcaacggcagccagctcggcggtgtagtcgtaagggagacttcttcctggaccgcagttcgctcggccaatggcgtcatggtgaacacaatttcatatcccaattggccaccctcaccgtgataaacgacctggtcagcgccgactgtaacctgcaactgttccggctgatcaaaagccgaatcggaccgctgtaacacgtaccccgtcgcggttggcttgaccgtggtaatggcagtcgcccatgctggtaagttcagcggatctgctagcaatgctcgcaccgttgctggagttgcctgtgttaatacttgattggtaaataatgctgttgtcattttataacccccaatgttcatcctaacccggtcatcgttattacggccaaccactccaaatcaataacgggccattagatcaagtgcacatgtatttagttggtgcttataaaatacacggtggggacgccaacataaaatcagaatactgataatttacaggcggtcgttaatttgttctttaaacaggtctttgaaaacttgtgaccgttgactggcaacccgcgccgtggcagtctcccccgccgccattgcgagttgcgccatcaactgataaatattggctagcatgtagtgtgaatcgtgtgtagtcgcaaaggccaacccctgcgtcaaacgggccaccgccaactgggaatcatgttgttcataggccaccaacccagcgaggtaaaaaacaatgttggcattttcttcatatgcactcgcatcaatgtcagcgagtgcccgggtgactaaggccgcgactggggcttgaggatggtggtgcgccttaacgacggctaacgaaatcaaggccaagcgtgtcaacgttgtcggcggcgagctgggagcagccataccaattgccagccgtaaattttgttgtgcagcatccgatgtgcgatcaacctgccaacaggcgacacccagataataatagtaagcctgagtctgctcatccgtttgaacatgttccaaagtggttggctgtaatagccaatccttcaattgctgatactgatgggcattgcacatctgccgaacgcggtcattaaacgcttgctcggcactgatctcaaaatcgtcggctaggctcaacgtactaaccgcgacccctaatcgctgacacagcgccagtaatagccgggcattcggcacgtagcgatcattttcaattgctgacagcatcgattgtgcacaaattccccgggcagcttgcttttgattgagttgctgggctttgcgtgcctgctttaacgcagttcccaatgtcatgaccattcccccctagatagcttttgctaatgagtgtactaaatttcccatattaaggcacttaaaaaataccattcaatgctgttttatcagtcagcaatcgaatggtattttgaaattggttatttaattgacatgccgttctcgaacttgataccaaataatcccggccacaccgaagacaattggtccaactaacatccaaatcgtattttgaatctgcccagtttccaagattggctggatcaacgtgaaaacattcgcacctaagacgacaatgaacacgacccaactaataattttcgtccaagtcaatgacttgtacacttcaaaaggcttaacaatgttctggttttccttaaacttcggaaacgcgtatagcaagaagaggtatggtaacgtcatcgaaacgttcgccatcaaggtcaacacattgtaaaaggctgacgcgtctgccgttgcaaaggacgccaccaagatgatcacaatcacgatggcacattgaaccatcatggcataacttggcataccagctttgttgagcttcgtaaatttcttcggccacagttccttaggtgttcccaagataagcgtcttcaatggtgaataagttaaggtgaagaaggccccactgtaagcgaggaacatccctaagccggtgtaccgtgcaaaccacagtcccattgtcttagcggccgctgtactcaaaccaaacgcttgccctaaaacatagcccaagttttgcatcatgacataactaatattaccgaggttagtcgttggattcgacaaaacggcttgccagttcgtactaatcccccagcagaagattcccaggccatagcctaaggtaatgacgatggcagaaataataattccgcgtgggaaggtcttttcggggttcttggtcttatcaaccatcccaccgagaacttctagcccaccgtaagcaaaaatggcgaaaacggcaaacccgagtaacccgactggatgctgataacttggatttggtgacgtcatcacatgttgtaacggttgtgcgaattgtccgtgattcaaggctaaaacgacccccgaaaccactaacaggattgccgtcaaactggtcaccgccaggccgcctaaactcgtgacccgcacaatgcctttcatccctttgatggaaacgaacgtcactagcaccatccatagacaggacaaaatcccaatcatctgcgtcgcattcagaccaaacatcgcaaagcgctgcgtttgatcgctcccaaagaagatggtcgtaaacggaatccagactttagctgacgttgagactaaccaaataatgtacgacgcaaaccacatgaacgtgcccacgaacgcaaatttcgcattcacactcacttccagccacttgtacatcccgctactatcagacttaaccgctgccccgaactccgccatcattagcgcgaacgggatgaagaacagtacggctgcgactaggtaaaatagaatcgagctgtaacccattaaataataggccaccgtactattggcaaatccgaaaacggtcgtaaagatcatcatgactagcgccatcaatgtaatcttttcattatcttttgttgccattattgcactccctcacttactcctttaatacttttgtaaagctattccaatttaagattaccgaacgaaggcaataaagcgctttagttttcctaacaatattatgattttttcatgtgatagtcagcgcaattattcatctaaacaattgctgcaacagttattgacaacaactatttcataacggaaacgttcatttaataacatagtaacttttctttaacatagctgacacataattggcgtattctacacttatcagcttagggaaaatataaaacggggttatacatatcatgaaaaaatttaactttaaaaccatgttgctattagttttggctagttgtgtcttcggggtcgtcgttaacgtgactactagtcttggaccacaaaccacaatcaccgcccaggcctccaagaagcttagccaagcccagcaaattgccaagatcaacgccaagctttcgaaagccaaccgcgctgccaaaaattggatcgcctatcgtgaatctggatacagttatacggctcgtaatggccgctgctacggtcgctatcaattgttgcgctcatacttacacggcaacttgtcacccgtcaatcaggaaaaacgtgctaatacctacgtcgcctcgcgctacggctcctgggtcaaggccaaacggttctggcaacatcatcactggtactaacccaatttttctattggatcacactaaaaagacgactaattactaagattgtgaatctttgtaattagtcgtctttttgtaggcagtaatataaaatagcatgaggactatagttcaccgtcatttaacacttggttacaacaggtatgccgtgattgccgcaccttttctaaacgatattgtgaaaaatataattaattagccaaaaagtattgcaaattgtaattattacgactataatttgattcgtaaattagtaatgatagcgattacaatataaaaagaggttattaatatgactgaacgtaattttgatttcttaatgcctagcgttaactttttcggtcctggtgtcattagtaaaatcggcgagcgtgccaaaactcttggtatgcacaagccagtcatcgtcaccgacaaatttcttgaaagtctgccagacggcgccgttgctcaggtgcggcggtcactggatgctgccgggattgactacgtaatttataatcaagttgaacccaaccctaaaattcataatattcaagctgttaaagccttatatcaagccaatcaagcggactccctgattaccattggcggcggttctgcccacgataccggaaaaggtgccggcatcatcatgactaacggtgacgacatcactaagttagcggggatcgaaacactcaagaatgccctaccaccactgattgcggtcaacactaccgctgggactggttctgaattgacccgtcactgtgtcattacgaatgaagaaacgcattataagttcgtcgttgcttcatggcgtaacatgccactcgtgtcctttaacgatcccactctcatgctagatgttcctaagggactcacggccgcaactggcatggatgcttttgtccaggctatcgaaccctttgtttctgtcgatcacaatccgattaccgattcacagtgcatccaggccatcaaattaatcgaaacatcattacgcgaagccgtcgccaatgggcataacctagaagcccggacacacatggtcgaagctgaaatgttagccggcatggcctttaacaacgccaatctaggttacgtgcacgccatggcccaccagctcggcggccaatatgacgcaccccacggtgtctgctgcgcgctgctcttaccctacgttgaagaatataatctaatcgcgtgccccgaacgtttcgccgagctcgccaaaattatgggcgaaaacactgatggcttatcgactcgtgatgctgccgaattagctatcaaagcgatgaaacaactcagcgaagacgttggcattccgcattccatcaaggaaattggcgccaagatcgaggacttcgaacacatggcgactaatgcgcttaaagacggtaacgccttctctaacccacgcaaaggtactaaagaagacatcatcaagattttccaagccgcatatgatgccaagtaatcccccattcaaagttaactaaatcattcacagcaaataatcggttcaagaattcatagtaaattcttgaaccgattatttgattgggacctctctacaactcgaatcgttactcggcaatgccatgcaccccacgtttggacgcgctattcaaaataaacaccgcaacaataaaccgacaaacacagataagaatatctatcagaacacgcattgtgcaaattaatttgtcctgatttgtgattaaaacgtgccaagtttagattgttattcgtcagccagtgcgcgtcctattccgacctccggggctgggtgacaattgctggaacgtagccgacgtcgatttgagctaacgcccaacccgcgtcatctcaaatacgagtcttattctaagccggaagtaccccacttccgactaagaataatttggctactgagcattgtcacccagcccctccggtctcaagagtgtgaggggccacgagttgaagccgagcattgcctagccaacggattaatgcggttttggcattagtccgttggcgtagcaagcacaggctttagtggccccgaacacgtttcgggaagccgctcaaatggctaatgaacgaccaccgaactcggtacaatttgttgttcgctatttgatactggaactttaaacaaagcgttaggtgtattaagccctctgtcaagagcttaaatcttactacaccaattcaggattagtgagctatctcaatatcattttcaccctgacagttgattgacaaaattatggtttatgaaaaacaatgacgaattcaccaaaagttgggtacgcacatgtccgccattcgaacactgtcccgactggaaggcgtttcggccaatgcccagtggtgaaatttcacttagcaagcgtccttggcttggttagtgaaaggccagtatttgagacgtgggcttcggcttaaatctgtgcccaccacgttccggcagttggcagaaatgcctggaggtcggtgtaggacgaactaactaaacaagtttacgctgagtcgaactttttcccagcggtccatagctggctgtttttgaatttaagaaccggcacgttttaatcacaaattatgcaagccgtccaagcggcttgtgtttaacgcaaaaaacagcgatgtcaaaatcaacttttgacatcgctgttttagaagttattcatcataactgatggcacccagccggcagctatttccccggttgataatcttcatcaatgatcaagacaggtttgatggtcttgccgctacctgaatcagcattagcttgattaatatcctcaaacttatagaacttttcggtcttttcaaatgggaacatgccatgttgatagaaatcgattaaccgtggaatatcaacgccagggatggcatcacccatgttaacaccaatgactttcttatcatcaacacacaaatcgttccatgagctaatggtgatatttttggccgtaacggcaatcaaagcagcagtcccaccttgagcaagtgcgtggattgcagaaaccataactggttctaccccagtcgtatcaacggcaaagtcgaccccgtaaccatgcgtcaacttcttgattgcttcaactggatcttcttccttactgttaatggcatgagtagcacctaattctttggcgagttctagccgtgaatcaacaatgtcgaccgcaatcacttcggtacagccggaaatcttaccagccatcattgccgctaaaccaaccgcaccagtcccaaagactgcaattgtttgtcctgggcgcggctgtaaactgttcaaaacagtgccacttccggtgacatagccgcagcctaaaggtcccaagcgacgtaaatctagttcttttggtactttaaccgcattacgttggtcaactaccgtatgagtcgtgaaggaagattggtcgaacatatcactgatatggtgcccgttttcttggaaatggtcggaaccatcgggacgagtcccactcaagttatagtcggcataattccgacatttagttggcatgcctttcagacagttatcacatgttccgtcagcgtaaaatgatagaataacatggtcgcccacttcaaaattagttacttctgaaccgaccttttcgacgattccagaaccttcgtgtcctaaaattactggataacctaacgacgcatcaccccgccgaattgcttcatcagaatggcaaattccagtcgcaaccattttgatttgtaaatcagttgctttcatttcagctaattcaatatcatctttaatgacaaatggatcgtttactttatcaaccactgctgctttaattttcatgttcaaaccctcgtttcaaatagtatgtaaaccgcttacaattaatattgttacacaatacacaatttgattcaagcgcttacaaaagcatctaacaccacacttatctccgttaaatgggcattcttctaattttacactaacgatatgatacttaattagtgtaaatctaatactcttttttactgattgtgaagaatttatagccagttttcttccttaaattgtcgactcaaaaagcgggtgtcgcctccagctcaacaacgtgaactggcgttagacacccgcatattttgtaccattaacacacatttctgcttgtttaacaagcacgatttcatccgacgctatctgctcatcgtctacgcaggttgggcgttcgaactgatcttagctttatttagcaataccgaactcgtgactacggacaatgaactaaaggccattgctaatccggccaattcggggctaagcgtcagcccaatggcaaagaagaggcccgccgcgactggaatcccgagcacgttgtacacgaaagcccagaacagattaagtttgatacggttaaacgtcttcttactcaatgccaacgcccggtcaacatcacgcagatcgttcttaacaagcacgatgccaccagcatcgattgcaatatcagttccggaacccatggcaatcccaacatccgccgtcgtcaacgcgggggcgtcattaataccatcgccgacaaaggccaccttgccagccttctggaacgcgtgaacgtgctcagccttatcacctggcagcacatcagcaatcacttcatcaataccgacttgatccgccacagcttgtgcgacccgttcgttatcgccggttaacatgaccgtcttcaagccacgtgctttcaaactcgcaatggctacctcagacgtcgatttggcgacgtcttgaatggcaatcaatccaatgatttcgtgatttaagcccacgtacacgaccgttttcgccgcgtcctgaagctcagtggcttggcgttgtaattcagcactaatcggctcatcagttaataatttatgattaccgaccaccgctaattggccctcaacttgagcagtcacacctttaccctcgatggcttggaagttcgtggcggttggtgcttgaataccacgggccgtgccgcgttttaatattgccgcagctaaaggatgttccgaagccgcctctaagctagtggcaacgcgcagtacttgggcttcgtcgccgataacatcggtcacttgtgggtgaccaaccgtaatcgttcccgtcttatcaaagatcaccgttttaacgtcattgacagcttccaagacctcaccatttttaatcaggatccccatcttggcaccacggccggtaccgaccattagtgcggtcggcgtagctaaacctagcgcacacgggcaggcaatcacgaccacagcgaccgcaaaaatcaaggcattcgcgaggctagcattcaagaaaacataccaggtcaagaaggtaacgatagcaataattagcacaatcggcacaaagatatcagaaactttatcggtcagcttttgaatcggtgcgtgactgttttgtgcttttttaacgagctcaacgatttgagccagcattgtctggtcaccgaccttgctagctttgaactgaaaggtcccattactattaatcgttgaaccaatgacagcgtccgccaccgttttttgaaccggcatactttctcccgtcaccattgactcatcaaccgttgagcggccagttgtaattacaccatcaacgggaattttttcccctggcttgacccgaataatgtcgccgaccactacttgatccaacggcacttttacaaattcttgatcgcgtaacacttccgcttccttggcttgtaagcccactagctttgcgaccgcgctggacgcgttgtgccgcattcgttcttcaaagacttggccgagcaaaacgaaagcggtcacaagtgcggcactttcaaagaagactgcttgccctgttgccattgcgtataagctgtaaaaataagccgtcgcagtgccaatcgccaccaaagtatccatattggcatggtgcttagtaaaggacgcccacgcactttgcaagaacggccgagccgaaacagccataatgatggtcgtcagaatcaactgcgtccaatcaccacccgggagcatccagccaaagggcatcaaaatcatattagccagtagtggcagggaaaatattaatgaaatccaaaaccgtttcgtcgtgttcattacgcaatcaccaccttgccactcaccatgtccatcccacaactaaagtaaaattcaccggctcgatcagttggtaccgtcaccgtttgcggttggtcaaggggtaactcagtcgtaaagtgcaagtcggttgaatgtacttgctctaagcacccctgcgtactcgtgcgcgtaaacgttaattgggccggtacaccttgttgtaacgttacttctgctgggtcataatggccgtctactgtaatattgatttgttgtcgtgcgctcatttgattttcctcccactatttaatgattaattttccatgaaacatgtccatcccacaggcccattgatattcgccagacttactcgtatcaatcgtaattgcttcaacttgattttgtggcaattcctgattgataccgaaatcactgaacaccacgtgatccagacaaccagatgcatctttgcgcgtaaaattaagtaccgccggaaccccttttttcaacacgatttgctctggcgaatagccacccttaacctccacatcaacctgctgtaaatcatcaaccgcactcgcggtgaccgttgtcgtagcatgcttcccgaagaaccaccacagaataaacccaattgctaacccaccaattaataagactaatactttaatcatcattttattcgtccctttctcattatcgtttacacttgtaatctatatgtgtatattaatcttttcgtttacaattgtcaacgataaatgttgtttttaggcataacccttaattttttaaacgccccacccagttgctactatcatatgtctgacatttagtgtcactacaaaaagtgccgcgtacgttcctttgctcagttattagtcgccatttcgaccggtcaactgaccgcatcaaaagtaccaacgacgatatcacaaaaggcaatcactaccgtttaataagaaacgtcagtgattgcctatattaatcattcaaaactagctgtccctcaaaggaacgttaaccccgtcaatcccggttcctaaagatccgcaactcacaacgggtatcatctcacaactgttaatcgcgggacttaatcttcagccaacctaaaattgaactcaatgctaatccaatcatccccaagagtgataattgcgtattctgctcgtccgtctggggaagggtcgtcatccgatgatgcttagtggtacgttttgataccgccggtgcactaacccaaccaatacctgaaacggacgcagctgttttctgctgattcgtctgcacaacgctttgatctgactctgcttgtgatggctgtgacgtccgtgattgttcagcctgattacgactcaaattggcttgatcacttaatccatctggttgctcagaatcagctggctgactcggtttttgcagttcccctggtttttcggattgacccggttcttccggttgactcggttgctcgggttgacccggctcttctggttgacttggttgctcagggtgccccggctcttctggttgacttggttgctcaggttgacccggttcttccggttgacttggttgctcaggttgacccggttcttccggttgacttggttgctcagggtgccccggttcttccggttgacttggttgctcaggttgacccggttcttccggtttgattgccgatttcttgtaagtaaccactacaacctgatcggcagttgtgacactcacctgctgggctgccacttctgttaatgtggtcgtggcacccgctacaattggtgaaataacgcccgccatttccgttaccgagactggtacccattcttggtatgtcacttcgcccgtcactaaatcaatcatcgcattgcgttgaaattggacggtttgtaggaccgaggctgcggctgtcgtgccatcctcataaacatagtgaatgattctagtaacggtgtgcgttaaatcggtgtcgccaccctcatctggaaacaagatattcggattgtcaggatcaactggctgtcctggtcgagcaggattgcctggtgttaccgtaataatacgatggtcataagtcacgattgtcgtcatcaggtccggatcagtaatcgcgaccgtttgagccgctacagtccttatgtccggatcagtatagccttggacgactagcgttggtgacgttaccgcggcaaattgaccactgccaactaaaatccacgcataatcagcttgactcgtatcaactaatccatcaccgtttaaatcatagcctaaacatttgccagtctttttttcaataattgctgttcgttggtaaataaccaattgctggacggtcgtggcaatcgattgatgggtctgtcgatcaatatagctgataacgcgccgtttattttgatacaccgtaacggcctgagttgctagtcggtaataaacattgatcgtaacatctttatcatcgaccccagcaaccatctgctccggcactacttttaggtccggcgctgcgtagccctcatggctcagatctggcgacttaaccgcgccaaaccacggccctgaaccaacaatcaaccatgcttcatctgccaattgtgtctcaatctgtccgtccccgttggtatcgtagccaagtatcgttccgtcatgagcaaccacagctaataattgatacttaaccgtttgaacaacagcatgtagtgacgcgatgggttgcagtgttccaccatcgatatagttaatcgtccgggtaaccgttcgctgcgtcgttgcaatatgcgtttgttgctgatacttgacaattacatttgtattcatcgttctatcaccaccattaatgatcactgtttgccccgcaactaccggaatatcaggagcttgataaccctgcgcagataagtctggtgagacaacctgtacccaatcttgatccgttggcggtactaacagccatgcaattgtcccatcactagtatcaacaattccgtcgccgtttgtatcatagccgagcaattcatgagttttagcattaaaaatggcaaatcgcacgacccgtacattttgtataactgggccagcaagcaccgccccagttcgctcatcttggtaattgatcgtccgcgttatcgctgaatattccggtatccggctgataggtattatgggctcatgcgatggttggacgttcaaccaagtcgttgcagtctgatcgccaaattggtaagtgattagatagcaatgctggcccgcaatatgtgtatcaactgcattcaaccctgataaacgtgtcccagccgcatctgtaatcgtgatcttcagttgcccggttgctagtagatggcgaaaaccagctaaagtatcaatgctcgtaccatccgacttaatcactgcaattaagtaatccaacgggtcatcagtaaccacttgaccaaaaccataattatgctcgttttggctcgtaatcgtctctcgaatagcactgtcaacatcgccatatccatattgtaaaacggccgctgaatcaacattttgattagttgtaaagacagcatgtggtgccacgattttaccagttatcatcgtggtattctgaatacgcatggcatgattgaagttccagactagattcggtgtactactagaaaaaccgccaccaatggttaacgctggtgctgccgtgacgacgttataaataaccacatcatcattattaaaaccagtggtccgaataccactgtgccagtcattcaaatcaatattcacggcataataatggtgtccttgataagagcccaaatcagcagttccagactcaccaatcagcatcttactcaacgtgccaccattagttgccgataaaatggttcctgcagtaactagttgatcataaaagtcactaatattgatctgagcttgactaaattcttgcgcattgattaacgaagaatcaaccgtaacgctcggtaaacctttgattgcaccatttcctgttggccgaggcttcgtaaaatccatatcctgattagctacgggacggtccaccaatccattggtagttgtaaacgtgattgtattgtttgtcactgacaaaccaccgtttatgatggtctcccattcatcatcctggccagaacgaattgtcgcccccgtattgataacgtgcagaccaccactaatcgtagccacactaccatcaaacgaactattcacaatcgtaattcctgtaagtgcaataattcgatacgtggacaaccaatcttggatcaaagcaatcaaagccgcttgcccatgctgtttggcatactgatcaagatagttcttatcggctaagttctttgctgttgtcaaaaacgacgaagcggtgactgtccgttgcttgctcggctgctttgttgcaactggtatgtttattgacttagtgacatttgttttattcaatgcccttttctcaaccctgctgctcatttgatcagttgccgctacagctcggcttgaatttgagttcacaggggtagctgtcgtcacggtactcactgatgactgtgaatgaacagtccccgataaatctgaatcgatcgtcttaccttgaccgcctgagtattgcgcctcagataaactttcagaatgggccccactgtcagcacctagtgcgctagctgaactggccatatcaatcgcatgatgagtgccagttgagttggctgctggcgcctgatcagaacttgttgcggctgacgcctgattagtactggcacccgcagaagctgctgttgagtcacttgcctgttgatcaacagctgttttatcttgctgtgttgaccgctgttgggcttcactagtcgttggactgaccgcctcaacagtgccagtcgtagcagattgctccgaactagtcctgtcagctgacttgctggactgggcggtcacactgtggcggtcacgagttaccgcagtttttgaaatccgtgctacttctgttaattggtcttgactatccgtttctaactgcaccgaatgactcgacatggtaaccgtctcagcttcacttgcttgagccactgtcggcacaattctccaacctaaaattaaaacactagaaaacaaccaaaccttgggattggttacgcgccatttgccccgtgtatatcgcatagtaatttgcctctgttaattttagtcaaatatcgacatattttgaattttgagacatagtatacctgcttttatgcgagtaaaacgggggtttgtatttacgcgaaaaaggttatctttaaaaatacaagtactaatcagttcgtgtattaagttgtcgaaattctaagggcgtttgaccggtctccttcttgaatcgttttgaaaaatcggcggcatcgtagaaacagagttcagcagcaatggctcgaatggttaaatccgttgccaacaacatatgctcagcttcctgaattttcttggcattgatgtaatcacgaatcgacatatgcatctcttgactaaacgaccgccgcactgactcaggattgcaccgcgcattgacgtgggccaatacctttttcaccgataattgatcatgcaggtgagcattggtatagtacatcacatcgagcgttgactctaaatgtgcgttataagctaatgcgttcggtttggcaattgcggcaaaatcacgaataatctgcacaactagtggctggtaacgttccgtcgtcacgggtaatttaactaaccaacggtgataatcattacgtagcttaacaaattcataaatctcagcatgattttggattccctcaaaagctaagacatcaaccagcgcactgagttgcagctgtttttcctcactcgataatttatttaataaatcgcgcgaacgggtcagatttttcttagcaaattgaatgccttcttcaatctttccggcccggtaaaatcgaataaaatctcgttctaagtaacctaataagatcagccccttggtggttgggtgctgatcattataatcacgcatttgatgtaaatattgtacaaattgtagttctgtccccataatctgtaactcctttacgttattggtcaaaatttgttaacccaaaaataatgctcattttaacagatgtctagcagtaatactatttacatttgccatctgacaatttacaatgctaactaatcccgctgtacactaatgattctaacaaatattttttatttaacaatcaatacacaaaagcggttatccctcgtaatctgggataaccgctttaaagcaatcatttttatgttaaccaattcacataaagtgaaaaaagtatggtcttaattatctaaaagcttatcgttaaattctccgaccagcgctcacattgccattcatgagttatagcaatgatctaaaaaattgttttaaatcttcgcgagttgccggtgataactgtgggtaagcgcaattctcaattgcgccttgtaacgaatacaataattgaatacaagcgtgggggttggctttttttatggcagtaaaagcgactttgctacccgttgactttagctgttcgggtgtcgtaatcgcaacggcttgcaattgtttggctaatgttggcccaatattaggtaatgttgttagtaatgccaccaaattcagatcctttcgattcataatcatagtttaatgtttgataatgagctctgcaataaagttgccctcttcaatacaataattaacaactaattgatctgtagttaattgttcaatactactcaatccataacccaaatgtcctggtttagttgtaaatcgacttttcttgataactgataaatctaccgcttcatgcgttggaatttgatttgtaatcgaaaataccgttgtgtgagcatcccgatttttaacagttagcgccacttgatgattcgctcgggcagcagcatccgtcgcattatccagcaaattacccaaaatccgcactacttttatctgtggaatatccgctaacgtgactttctctaagattgtcaccactaaatgaacgttctgaccgttggctgcctcatattttgcataaattagaccactgaccgtcggcatatccaagcgactcaaatcactcagtcccgactgacgattaagggttactctggcaggcattacttccgttgtaaaataacgctttaagccggccatatcattgttctgaataaatgccgacatgctcaaaagaatattctcataatcatgtttaaacaaatgtaaatcacggttatggtggcttaataattcgttgtaatttgagacttgtagcaatagctgcgcatcattcaagtgactgtttttattactaattaaatacgacccgataatgccaaacgtcacgatagccgcaattgccatatacgtttgcgcattgactgaccattccatcgcaaaaacatacgcaataatgtaaatagcaaaaaacaaaataactaataagtaatcgctaatattaacacgcgcccgttgcaagaaatcggcggccgacacttgtactaaccagcgatgcgctaacatccctaaaataataatgaccggcagcatcataatcgacgctaaaaagagattaatatccgctgtcgaatgtagacctatcgcttgccgtaataacattggcgatgcagattgggctacagccttggcaatgacacccatgatcgcccctactaatcgcttaagcgcattcaaaaagattgccaccggtaacattaaaatccactgggtgtacaacaaccgagaactcataaaggtggtcacacaaacaatcgggatgatccaaaaataagccagagggacttggggccataagtttgaagccacttcccccaggctcatcgtaatgataaccagacttagccaaatgatggcaatccgccaagtgacatattctctaaaaccaatcattaaaaacaacatttcataaccgccagaaatcaacgacagcgctaaaagtactgctgacacgccaaccacctcatcatattaatacatttgttagttcactttactatatcagaaatacggcttcattaaaccctttattctatattgtaaacataaatttgcattaaactataataaagcccttacaatcttattattaattattcataaaaaaagacattgcaaatcgacatacttttgcaatatcttttaaccacttatattaatttttaaggtgtatcctgtaaggtccaattaatcgtcccactgtaactgtcaatttgcacactaggctggacatccaataaaataccctgactgctcgaccaaccacttgcagcattagtgctcgtcgtacccgcgattttcttgccagaactgactgttaccgaagtattcgtcagcacctgtttgttccccgcgttcagataaatcaggttgccactcatggtccgcgtactggatttcatggcagttgctgtcgcccgtaagtaccactgtgaaccggtcttccgtgtgtcattaacagtgatgttccaagcatttgtcggctgatatagtgtttctttaaacggaatcgtcagggtgccaaacgtcaaacttgctggtaatgtgcccagactcaacgttccatcccgcatcgtcacagtaattgccttagcatccgacttcagcccagaactgcctttcccataaatattgatcgtggtgctgctaccaacggctaaactactcaacttgctcgctaaactagtctcgtcggccgcgtaagtaattgtgtcagtcgcactatccggatttgtcgcaacgatgccagcttgcttaactaaccaggcgacgaccgcgctatcacttgtcagtgaatctaagtcaccaggatatagatcgactgccgtctttgaactagtaatatttagttttttgagggtcaccgctgcggtcgccgtccccttatcaccggtaatctcatcgacctcagtgacggtgacgttacttaaagtaccgagtgcagtcccaagattcagcgtgtacgttccatcgcttccgaccgtcgtcgtcacaccattaacattactactgatcgtattgccgggtgtcccggttcctttgatcgtcgtatcagtcgaataaagtgtccccgtaattttaggagataatgtctgcgcgttgaaacgccccagctgataggtaccttcctcaccattcactgtgattcggaagccaatatagattggcaactcacttttaatattttgaaaattgaccgataacgtctgcgtctgttttgaagaactaatcataatcgaattgccactgccaagactagtaggtgtagccgtaactaatgtcgccccggtgtagctcccacttgccggaccagccataatatcaaaataagcttttgacatcgagttactagattttaaggtaatcgaacccgtcatcgtcattgtaatttgggtcgtctgcctcgtaattcgaccattatccgcatagttagcggacacattgcctaatgctggatacgcttgcaaaccgttatcaacattactaccaaccgaattaccacccggtacggcctgaaaagcagcattagctttcacgtccgtcatcttgctcgtcaaagtcgcagcgttaccctctaagggcagcaaattcagcaagccgagtataccgaatacaagaattagtaaccattttactcgtctgttacgcattccgttcacccccatcttgccgttttaatattcggtacaacgcgcctgctaaaacactagctaacaaccccatcccaccaaggatactgccaatgacaagccgctcactcgtttggggcaattgttgaccattgcgtgattgcccacgcaaccagccatcgataattagttgtcggcggattggcttgcgctctgactgatttctctgaccctgggtacccgggtcagctggtctaataacgtacgggtgaccaccatcaggaatcacacgggcgggaataatccggtcagcactatactcagtctcataaaaccccacactgatctcagtgcgaccgtgtgttgccgcccgcactggtattgcccagctcagcacgagcattacccctaatattaatcgccaccatttattcggcatggtccttcccccatttcactgaccgaactaagcacgccgccgctttttgatccagaaaaagattaatagaccgattaatccaataattaacatgcctaacgctccgaatagaataaaccagccaacgctcattcccgaattatcaacggaagcctgattatacttatctgccgcggccgtactgatgacaaaatctttatcaaacacccatcgatgatcggtatttttagcaactagccggacatgatacgaaccagcctgcaaacgattggtccctgtcaaaattggtactttataaactgagttaggtgctaattgcacattcttctgtgtaaagttcttgatgaccttgccactattcttactcgttaacctagccgtaatcgttagtttggggacgatcaccgcagtaacgttgcgtaattgtggaaacacccctcgccgataattctgcatgcccaccgtaatcgtatcgagcttcaattgtggttgtggcactataccagcagtatatttcagtccaatcacatacgaatactgattggcaatattcatggaacccttaacacttccggtgactttattggcgacccgtttaaaataccaaccgcctaaaatcacaccgttcaccgcttgcttaggcatcgtaaccgtcgccgttaccactttcgacccgtttgcgggtatcgtgatggtcgttggtccctgtattttggtgatttggtccattcgatacttcaaagaaggatcataacttttagttggtgtcacgtactcgataatgccattgccgttcgtataagccgtatgaatcgccgtttgaaccttgatgtcagcgttggtgacgttataaatcgtcgtctgaatctgttgctgtcggccacgcgtcatttttaaatcaaaataggaattatgttgatcaatctgattattcggaatcttcgcggccacgctaaacccgatgtcattgctttgcgtggttttactgctactgctacttgcgctactggctgccaatccactaacgctgctaacttgcagacctaaaattaacgtccccacaatgaccatgattcgcttcaataattgcatcttctcgcccccattactcacatatgtacttggggcgccgttcgccccgatgatgcttaatttgttggtaaatcactcaatgtccaattcaggttagcgctataggcctgcgccttaaccgtattagccttaatattcagtgtcaacgcctttggatctaagcgactaacagttaccccggaaccaccgcccttatcggcatttaagacggcacttgatcccaccgtaccatttaaagcaacttcggaagccgtggcaaccgcaccattggcctccgagccgctgttgaccacgtcaccttttggtaaactgagcgttgcgccctttgcagccgtaccatccgttcctgttaaattggagccggtaaccgttaatttccagccggcattggttccccgaacatcagaaacttctacaaccatcttatcctgccatagcaaagtatatgaactagttgggtcaaccttatattgttgatcatttaaaacgtccagctcatgcgtcccgtatcctaacgatttagacacaaaaatcagcgacaggtcgccacctgctgccgccccgttgtcaccatcgccatcagtacttggcacatcaggatttgatggatcaactggcgtcaccgtggacgtactcttcgtaaattccgctttgatatccgtattcccactacgattttctgcagcattggcaacaatcggtgtactacccgctaataataaagttcctgccattaataagtgtcctaacattggcttcatggtataaatccccctttttcatttaccagcgcttgtttagctttcatcaactaagaacggtggtcattatcaacaatgattgctctcataacaattcataaattactggcactaaatcacttgtgacctcccccaataaccttgtacgattgattaattaatttaaatgccgactcctttgaccacattttcattatattggttggtcagtaacagcgctaataatgtataacgttaactatatttacaaacccggattgttcgtgtaaccgttatcaagcttgggttgcttgagataattaggcgaacttcctttaaagccgttcaccaacaatcgatggctatccgaataaataaattcatatcaacaatctagtataggtagtaaattaattatttttctgccattgcttctggtgctgcaccacaaaaagtccaacccttgctgacaagtgttggactttcgtcatcgatattcttttcaagtctgcgtattaccacggaggaatgccattaacattagtaaagatcgccgtatcgatcacctttcggattgttagcacgccggtcctttcacagataatattggtcgcaactttagacgcgcgggagccgactgtccagtcctcctgccaagtaatcactttaaatcaccaaaattacaatactattgttgacatagtattactgattaattaatcaggctttcaatcgttatgctgaatcaactcggtaataacacaaagcgctggtgatgatccgtgcctgcttccaattgagcgtgacactgagcggcatccttaaaatatcgctggctgacctgatcatccaatagcagtccggcgctaaaagctcggtttaaacgactggccgcttgtgctaactggtcaaccgttgcatggctaatcacaaaaccagtgattcgttgttgagacatgtaaaactggcgaacagggaactcaaattggttatcctgcggtgccgtaatcaatgtcacctgaccacctaatcgtaataacgctaaattaatcgccagtggtacgcgtcccgaggtatcaatcacatggtcaaaagtccactgatccgtcgttaactggtccgcaaaccccgcgtgataatcataacaggcggtactacctagctgctgacaccgtgcaaaatctcgtggtgatgcggttatcacaaccgtcacgcccatttgatgcgcaagttgaatcagcttgcggccaacgttgcccgcggcaccttcaattaggagtgtctggccgcgacgaatttccatgacgtcgttaagtacgatggcggctgttgcagctgaatggaccgccgcgacgagtggcatgggcgccacgccatcaggaacgtgatacaagcgatcagttggcaccgccacatactcggccgttgcgcccattcggccttcatagcccattgagttcgtccagacttggtcgccgatttgaaagtccggttgcgaactggctacgacctcaccgactaaatcacgtcccgccacgtgtggtgctgccagggccgtcttaaacgccccactccgaacaaacgtatcaacatgattaacggccaccgccatgaccttcactaagacggtcgcagttgtcgccaccggccgttgcacgtcagcaatgcgcaatacatcgggactaccaaaattgtcaaaaataactgccttcattattatgccttcttcatatcgcaattaacaagttaggttgtcggctgggacgccctgttcaaaagcagctaaaacttccgctcctttagcgatttgaacggcattgtccagcatatgggcattgtccttaatagcgatccgcccctgatcgtaatccatcttaataccatcgttaaagaaaatgagatcgtatgtggaggtccaaagcgcgaggctttgattattcaccaccgttacgttgtattccgggtccggctgatcaagtacgattatcgtaaatttagttccaatactgcaagcacctccgtgcaaagagtacttgccaccaccatcatccgtcaccaaaaccaattgcttcttatcaaagcccttcgcaaccaataaagctttcagccgatcactaatctctatttgcgtcatactatcagcaccccttaattataattttatatgagttaaaatataattaaattatattcgtgcttcacgcccaatgccagtcaaaagttttcgcattaattcgacgccactcgatatcggagaatggttttcagtttatcaggtgccacccgccgtgcatcggataaataaatttctcgatgaatcttgctagtacgatgcatcccctgattggcgaccagttcatctatcttggcaaaactcgcgggttcatcgtcataagcacccaggtgcagaatctgtgccacttgcattgcgtcgaactgctgcacgttaatttgttcagttggcagttgtttcttagctttaaccgctgccaaagccggtgcaatcagttcattgggaacaaagtctggaacccgaatcataatgtcataactgaactcatctttgtcaagatggtcaagttgctgtcccttaatcgtcaatgaccagaccccttcaagcggaaaaacaacgtaatcatcaaattcacacgcctgtgtttgcgcatactgcttatacgcatgcttgagcccataagcagctggatataacgtttgcaggtgcgtctgaaactctgggccattgggattccccgttccatggatactcataaaagtttgggctggaatcgtcaacagttggggttgcttcttagtagcataggttgttttttcttgtttacgccattcatacttcatcttcattcacatcctttaagttaactacactttcattatacttagaaacaagccgctgcgcattgcctgcaaaaagataatgagtaagttagcaaaggtaaatttgtattcattgccaccgaacccacaaaaaagactcggccaacctgaccgagtccgtttataacagtactaatggctatgaatttatgatttatctttaagccgttcttctaatcgcttgatctttagctgcttgcgatgaatgtaccaagcaatcagtaacaacaagatgactagcagaccgaggctgatccacaacccccagttagtatgatgttcaatcacggcggttttgttgagttggttcgcacgatcacgcgtgatttcaaaatctttggtgaacgtccaatgttgctttttggacttcacggccaacttagcggtatattggccgggtttcaacgcatcccggccaacccgtaacggtaaggcataaactgaattaggtgccatctgaccatgttcattgacctgcttgtagcgcactttgttactaccacgacgatagatttggacatcagttttgacttgattcaagaaagcggccgttcgattttgtaggggtaaactaatttggttatacccgttattttgcgtcgcatcaatcttacccaatgtcaacttgttcttggtgagcgcgtggtcaccatgcaatacgaccgccactgagtaagcgtattgattcttaatcgccattgcgctcttactctgttgtttggcggccttttttaagaaactcagtccaccaacgacaacaccatcatacttctgagccggcattttcaccttaaaagtcacgatcttactggttcccttagcaagggtaatcttattcgccgccgtcgtaatcagttgactagcatcagctggcaaatcaatgttcttgccatcagccgttgcctgatactcaaccaccccattgggattagttgtcgccggtacaattgccgtatgcacggtgatttcctgagtacttgtgttcgtcactttcactgccaaagtggttgtttggctaggctttagtttcagatcatagtatgaaacagccttatcgatttgatatttggaagccaccggtgcgacctcaaaaccgactgtgttagccgaacccgttcgtccccagcttagactaactaatccgactagcaaaccaattcctaactgccaccatctctttgttaacatcatttctccccctaatcatgattcggaaaaatgacattaacccctactagccattatttttccgatcaatacttattagctattcgctggtgcagtattcaagctccaagttaacgttgtactataacttcccgtagctcgtgccgtagtcttgggaaccattagttgtgacttagcaatatcagccacgttcttaccattccccttacccacagcggcggtcatcaaaaccttgtcactattgagtgtatctagcgcaacaccggtattggccgttgcgtccgcaccagtcgtcgatgcatttgaatccaaaacaccattcaatgttagaatcgcacccgtcaattctttattagcaaccgctttgtcgtttttaaaaacgtcattttgcttcacacgtaaatcccaaccagcagccgttccccgtaagtccacaacggataccgccgctgacttattcgtgttgtcatagttatcgtctttggtagctgcggtgatttggttggtaccaaagtcaagactagcaccagctaagtccgtatcaccattatcaatagtgatgtcgcccccagtgaaaccaactgtcccattagacgtttgtggcgtatcggccgcactcgcggtcaaacctgatgttgcaatcaatgctgctgagaataaaagtcctaataatgtttttttcatgataatgaactccttttttttagatagttaaccaattgccaaccaattaaaacgaccaataacccaataccaccaatgaaagcactcagccaccattgttcactcgtttgtggtaaccaccccgggttctgatgatgaacagcttgactagcattcggctgatgcacaatcgaatgactcgactttgacgcttcagtcacctgtaactgattagcgccagtgtctgagttcgatgactcagcctggccgtcgaagcgaatcgttgctgggctctcagccgtactagccacaccaataatcggtgctgacaaccacccccaacaaagtagggtactgatggcaattgtgatgaaccccaaacgcttcatcaacaccactcctcctctgtatcattatttgcggtataactaaagccaaccctggccgaaaccaatcattaagctggaatagttattacggtacattgtaaatatacataactaactcgctaacaacaatcaagcagtcttacaaattttatgttacctaatcattatttttttcatcatcgattaggaaccccttgattaagcgtccaagtgaccgtcgcctgatacgtatccgtcaaggcacgatcggttggcacttgtaacgatagtgccccaagtgccgttttctgaccgaggatattgacgccttggttcgaaacagtttgatggttattgacgatcaaccgtgccacacctggcgtaagaattgactcgccacccgtttgttgatccttataactgagcacagccgctaatggtcgtgccgactgcttactagtgaagcctgatgctgagagcgttgcattgagcgaccacgttgaacctattgaccggccatcttgaataactagcccagtatcataggaggcaccgtaattttctgatttaccagtaatcggattctgaccaaaattaatggtctgcggtgctgagacaaacattagtcctccaggattgtacattaacgtaatcgtttcatctttgtcggtaaagtttccttgaaccccatctggttgatctggcacgtacccttgaatctcaattggtttaatatgataggcatcaccagttgcaccactgattttcgtgtcgggtgccaagtacttgccagcagcgtccacatacttcactgtaatcgtgttgccagtggcccattcgaattctccaacaatggttttgccatcgtatttagtcatcaaatcagctgacgtataaacttttttattatttaaactacgccatttcccaatataaggtgcctcactactaggatttggcaagtgccaactttcactcttaaaaaagttaaaactggggcccaacaatagacgtttaggcggcaacttcgaactgaaagcgttggtataagtttgcgcactgttggtattccagccagtcaaatctaatttgtctagactggtattttggaaaactgattcaaagttagtcactttggtcgtattccaagcacctagactcaaggtttgtaaacccgaatcttccgcaaatagctgtgaaaaatccgtggctgaacttgtattccagttttcaatgggcagactagttaactgggggttgccgtaaaatacttgtcccatgtcaacgaccttcgccgtattccacttaccaactggcaaattcttaacttggctaactttggtaaagattcccctcattgtcgtcacattaccagtctgccaattatctactggtaatgccgtgacactactcattttagaaaaagtccccgccatattttgtacattcttcgtattccacttactaatcgggagactctttaactgactaactccagaaaaagttccggccatattcgtgacagtaccagtctgccaattatctactggtaacgaggtgagactagtcatgccctcaaaagtataaccaagattggtggcactctgggtgttccaattcgcaaccggtgcagttgttaaactggcacagccactgaaggttgaattaaaatcaaagactttgccgacattccagttgtcaatcggcagctgggtcaagttagtatcgccataaaacgtgctccgtatcgtttgaacgttacttgtattccagttgtcgagtggcagggacttgatattaggaagcttagcaaaagtcccatccaacgcagtggcccgactcgtatcccaattagcgacgttaatactttccaagctagtatcacctgaaaagactaactgcatattaaccacgcggcccgtttgccacttatcaatgggtaaactcttaaccttcgacattcctctaaaaatcgcggacatgttcgttacgacacgggtgtcccaattagcgatgtctaatgacgtcagcgaagaacaatccgtaaatgttcgcatcatcgtcgccactttactggtattccacttgccaactggtaacgacgttaatgaactgtcaccattgaaagtgtcaattagatactgtaatgaatccgtgttccaattggcaacattcaacgtaactaacttggcacaattttgaaacgttccctccattctgatgacgctgctgacatcccaactattcaagtccaacgcgcctaactgtgaacagttcaaaaatagccacgagatatccgttacgccagttaaattaaggttggctagcccatcaatcgccgtaacattaggtaagttagcaaacagatatgaataattagtcatagtagttgccgttatcttaccgtcgatgacgatctttgaaacttgggtcggttgatagccgttagccgtcaaggtttttacaatccaactccccgtggctgaccctagcgatgcaccaaatgacccaccactcaaatgcaatgtgccattagtatctaagatcattttaaccgtcccattgaccatttctgccgctttggtcgtcgccgtttctgatgtttgattatttttagcgttttccagtattgtactgccactgctattgccactactgataccactgctactggtactactgcctgatgttaaatccgactgcttgtcaggtcccgaactttcctgggcctcaggtgacacttgtggtgccgagttgtttgcctcatcttgcaacgtcaatttcgaagcagaaaaaacactgctagtcgatggcattttctgatcaacactcaattgtgcgcggggaaccgcccgaataactgtccgtgatccacgatatccaaccacaactagcgctagtgccagtcccaggccgccccgataccataattgccggtgttgcatgcctatcgctcccttcacatagatagtattttaacatctcttgacgttaattatcttacattattttcagtttgtgacgttcagaaaaagacttacaattttacagatatccgaatattaaatttttatcaccgtgatattatttgtgttaataaccgtaattaaatgataagtatcagctaacgaacacccattttcatttacttgtttattcagtattcttcatggatacaactgcacgatggtcatttttgaagtgactcacgaccaagtcatttttcgagcgaactagatggcttaccaacgctgtagtgccttttccatcatggtcactatgaacagcccaaattggccaatttatatgcgctcacctaacctgctaatgacgataagctatctgcgttttttcaattattttaatattcactaggccacgttcaatctaattgatcagcaagcaacaaaaaaacaattccccaaaataccgaggaattgttcgtacttaagatatttaacgacccgtcacttcttggtaaacgtccaaacagctgctggggcattgccaaccttaactttaacgatctgatttttagcattaacgaccgtaaacttattagttgctgtatagcgtaaatatagggtcttagtagtcgagcctgacttatagctgactttccagaacgttggcgtcttggcagtcatgctataactcgcatacgagaccagctttttaacttgtttgccattcttataaagcgtctgattaaatccattcttagcgctaaacgttaagatttgggagtacttgttagtcgtattcgacttccaagtacccgctggcgcgttgactttaaacgatttagtcgtcttcttggatgacgaagtggccgccgtcgatttagttgccactttcttagtcgtggttgtcttgttagtcgtcttcttagttgaagaggcagtagttttggcagtctgaacacggatgacgcggtagaaataagccttagtcgttggattcgtggcgtacacataaacattgctttgcgccttcaatgtcttggctaatttaaccgtgtactttcccgtcgttttagaggccgttgcagttccaagatttttcttggcgttggccgtactttttacggtgatcttagcgcccttggttgccgtacctgtaatttgcgtcgtattattgtaaattgcattgaccttcaaacttggtgcgacattcttcgtagccgttgtcttcttagtcgccgcattcgctgtaatccctgtaacgggtaccgctgctcccagcgttgccaccatggctaaaccagttacagcaatcatcaatttcttcattgatcaagactccttcgttccactggctaacttgtcagcgatttatttacgcctcgtagtatagcagtttttctatcggacaaccgctccttattgataatttaataatctttatgctttaattacaactgaatcttatcgaactgattttaaatgcgttatcacatccgttaacgacggtacaatcgcagtcgcctgatcagcatagggctggttaggccgtttcatatccggcacacaaattaccggaatcttcgcggacgtcgccgcttgaatgccagcttcactgtcttccagaaccaaacaatctgcaggttgttgttggagtttggcgcatgccatcaaaaatatatctggatatggcttaccacgatcgacatccggtccgaaggtaaactggtcgaaatattgcgccacatcatgggacgtcaaaatgtctaatgcccgcgacttgatactagatgaagctaaggccactgaataatgattccggtgtaaaaactgtaacaacacccgtgctcccggtttgagctcaacgccatcctgcataaacgtcttttccaacgttaacgcccgctttaatccagtatcaacattaaacggcaagtcaaaacgttcaatcaagtgttgcatattcgtcaccgccgacttaccactgtattcctgtgcataagtcgccatggaaagcgtctgcccataatcctgtacgattcgttgatacatctttaatgaaataacctcgctatcaatcaataatccatctaaatcaaaaataactgccttcgtcatactcaccaactccagtctatttatcgtcaataatctaagcttatcataaccatttgaaaatgtaagcggagtcattactactaatattaagtttcaaaactaaatctggttagtacagaatttgtgcgaatttctatatatttagtaagcatagtaaaatacccccgcagttctttagtaacaacccagtgagtttcgcagatgaactcctagccaaatccctacacaatagctagtagcaataagttaactccactgatttgttgtttatttagtcgtcaaccgacccaacattaactccccctaatcaaaaatggtgcgccagaatgttttcattcttgacgcaccatttttaatttaaactcattgtctataaatcgtctcgatgtaacaaggcaatctcttcacccgcagctcggcggcgatcaatattatcctcaccccacacgcacagctcatgtaagacaacggacaaactccggccataatcacttagtccgtattccacgcgcggtggcacttgttggtacactttgcgcgtcacaatattagcggcttccaactctctaagttgttgtactaacattttctgcgagatttgtggaatcgcgcgttccaattcgctcgtccgcatcgtctgagtacgcagatggcacagaataattgatttccacttacccccaataatttccattgtggcctcgaccccaatatgatacgttttggtttccaataattgtccctccattccatacttactttttagtgggtatcccactttaaagtcggtacttgtctaaaagtcacttgctagtataatcattatttatcaacttagcaatagcaggaggcttatcttatgacaaaacagtttaatcccagttggacactttttgcactcgcaatcagtgccttcgccattgggtcaacggaatttattagtgttggtttaatgccactactcgttagcaactttcacatcaacttggcgcaagctgggctgaccgtctcgatctatgccattggtatcatgattggcgcgcccgtcatgacattactcaccggtcggcttaaccgtcaccgcttgatgatgttaattatgattttatttattattggtaacttactcgcagcaagtgccccaacctttggtgtcttacttgcaggccgggtcgtggccgctttggctcacggtatttttatgaccgtcgcctcagtaattgccgctgacgtggtcgcacctgccaaacgggcctcggcgattgccatcatgtttacaggactgactgtcgcaacggttactggtgttccgttgggaacgatgattggtcaattaggcggttggcgctggtcctttatctttattagcatgattggtgtcattggtttgttagctgattactggttaattccacgtaatctgccgttacccagtaaagccacggtccgggggattatccgcgtactcactaatccacaactactgttcgccttactcgtcacggcgctgggatacggtggtaccttcgtagtttacacctacctatcaccactactagaacagcagatgcattggtcagcgagcgctgtcgttttgattctagtcgtttacggcttaatggtcgcccttggtaatacactgggtggtcgttgggccaatgcacggcccttaattgcactattcaagatgttcagtgggttactcatcaccttactcattctaagcgtcaccgggtacagtcactggctagggctattgaccgtcctactgatgggaatctttgccttcatgaacgtccctgggctccaactctatattgttcagttagctgaacagaatacaccacacgatattacgatggcctcagcgttaaatatttccgcttttaacgtcggtatcgcactcggctccggtattggtggtcaagtcacgaccaaccttggcttaggctggacaccgatttttggtgccatcatggttgctgttagcttagtcctattgttaggtctaatttggttagcgcggcccgcaaaaagcaccgaccggcattgcgttcaaaattaataactaaatgacccgtagtcgtcttaaacggtcatcgaaaacactaagcttagcggcttaacaatgaccgccaattcggttgtcctatcgctaggctgagtgtttttctttatgtcactatcttttaaatccacttaaccgtcactagttcaggaacctcattaggaggcgactcggaatgttagtaatgaatcgtcccgattttcaccggcagccttcctacttttagttgggatttattgtttattttcagtgttatttgaagactaattattgccattttaggctgtcttaattgacttaaagcccgaatatgcccgctttacgccattgcgaccccgatttgttcgtaaaaccgacttacccagcattcgactgggttgcattttcactttcagaaagctataacggtaatatacgattggtttccacttttactgagaaggtcctgattgaatggtcagtattgactattaccactaactatcaagtcagagccagacagaaccaaccaactatgggggcgcaacatgcaacgcaaatcaacattaattttattaactagcatcactttagttatcggcttactggcggtcggcactgtcaaagttgttggtgatgcccacagacctagccaatcaacggtaaccaccaaaaaagtcgtgtcaaaaacgaaagccaaaaccacggctaaatcaacggtcatgcgcacaccaatcaactggcgtcaatcatccgaaacagtcgcgtatcccaatgtcaaccgctatccggacttatggattcacgtatcgttggctaaacaacggctatacttgatgaaccatcaccacgttctctatacaatgtatgcatccagtggcgtgccaactgctgaccgcaaaacaccccgtggcacctatcatgtgcaagccgaacggggaaaatatttttatagcgctagtgttgatgaaggtgcctattactgggtctcatggctcaaccatggtgaatatttgttccactccacacccgtagatgcccaaggtcactttatcaaatcagacgctgctgatcttggcaagcgaccgtcttcacacggttgcattcatctgagcgttgcagattccaagtgggtctataacaacatcaagtatggcactaaagtcgtcatcgactaacgaaacaactacaaaaccaccaaaataaatcatccagcaacctatttgtattaagacaatcaggtcgctggatgatttttattctcattggcacgttgaacgagttcttatttagctttaatatgaacagcttaaccgatttcgacttgctcagcaagatgattggccgttacactatccattaacatatcagcttccacgtataacttatgccacatcatgaaggtcagcacggtccacaattgacgcgaattatcacgaacacccgctcgatggtcatccaatagttttaagaaatatgtcttgtcaaaatactgatcggtttgcgacgtcacaataatatttttagcccaatcgtacatctcatctttgagccacaaccgaatcggtactgggaaaccaagctttttgcgatataacacgtgcgcgggtacaatatcttcaaccgcttttcgtaaaatgtacttcgtcgtaccgtggctaattcgcaagttggctggaatttccgctgccagattgaacacgtcccggtcaacaaagggtgtccgcaattcaaggctgtgggctaacgccgtccggtccgcattatgcaacaaatccccatttaaccacgtgtgcatatcgataaattgcatcttagagattaaatcatagtgcttggcttcatcgtaaaagacccgggttgtctgttgaaacgaatggtcacgattgtagtgcttcatgaactgttgcttctcagtttcattgaagataaacgcattgccaacgtaccgcttctctaacggggtcgtcccccgcataagcaacgaacgaccccgcattcctgctggcatcatcgcggctatccgttgaagggccccgttgattggcttcgtataccgaaaggctttcaaggattcgggctcatgataaatcgtatacccgccaaaaagttcatcagccccttcaccggtgagacaaactttaacgtgtttgacggcttccttagtcaagaaatactgcgggacagcagccggatcagctaacggatcatccatgctccagacaaaatgtggaaaggctgccatgaatgcttccggcgtgatggtcatttggacgttatcgacattcaacttagcagccgtttcctgtgcgacgtctaattcactatagccaggtcgttcaaagcccaccgagatcgtcttgagatttggattgaactgcttggcaatcgccaccacaattgacgaatcaatcccgcccgataagaacgccccaactgggacatcggaacgcatatggatcttaaccgaatcaatcaacgtctccttaagccgtgtcgcgtagtcctgttcagaacggacgactggatgaaactcccgatgataataacgcttgatttgcggcgcgtgtcccaactgttttgttaatgaacagcccggcgccagcatcttgatttcctttgtcagggtctcagtttccggcacatattggaacgtcaaataatcttgtaatgcctcttgatcaaaatgcttatcttttaaaatcttataaatcgccttactctcagacgcatagtaaaaatcatccccggcaatcgcataataaaacggtttgattccaaattggtcacgcgccgcgaataacgttttttcctgcttatcccagattacaaaggcaaacattccccgcagataggtcgtcaacttggcctggtatttggcgtacattcctaagatcacttccgaatcggaatccgtcttaaacgtgtagccctcttgaattaactgttcacgtagctcaacgtagttataaatctcaccattaaacgttagccaataacgttcattatcatatgacagcggttgatgaccacccgccaaatcaataatacttaatcggcgaaaccccatcgtgatattatcatccgcaaagtaaccctcatcatccggaccccgatgcacaatcattttagtcatttcccgcacaacctgatcatacgtggcattatcaacttttcgccgatccgttaagcacccaaccaatccacatattctattcactcccacacttaagttattgcgactaatcaccaatattattgttagtgaccaatcacaagtcacgctcaaatcataggcaatgcccagtacggcgatttgacttgcggaataacggcaagcccaccttgaccataattaacagccgcacttgtagcgaacataacccacttgattcaaactggttgcctctaattataatttagtgtagcctgtcgcaacggccgttttaagacaggcagactaaccattaagaccttatttggtccgttgaagatcatttcaaaataaatgtgcgcgaactgattggaatggcttagatctaaaattcaatacacctgaataaagtgtaaaaaaataaccgtttcaggaaaatcaaattgctgaaacgattattttactagttagcaaaccgaatcttgccaatctgaattttactgccgtcaatataaatcgactaagatttcaatcagcgattgtttttgccaatctgccttactaagtagcgactggccgctgcggaacacaggacggtttcaccgttagccatcgttagtcgccgataccgtttatccaatgaccgaatgcgggtcagattaacgacatatgacttatgacaacgataaaaatcagaattcaaatccggcacatcctttaataaaccgtaatattcaagttcaccatcatctaaatgaacgataatcttatgtggactcattgaactttcaaaaaataacacgtgttgcacgtccaacgatcgaatcgtctcgccaattttgatctggatataactattttgatcattgtcttcagctttgaaacgctcctgtgccacgcgtaagacggtatttaatcgctcgtataagcgatccggaaaatccttcaagataaaatccagggcttccacttgatactgaaacaccgtcaatgatagctccgtatgcgtcgtcacaaagataatcttacttcggatgcctaaatcacgaatttgactggcaagctgaatgccattaatatccgaattcaacgcaatatctaaaagaaagacggcttgagttggttgctgacttttgacatgcgctaatatttcatgcggatcggcactcgttaggccaaatcccatatccaattgacgatcaataatcactttactgaccagttgctgcaaggtttgtaactgtttagtatcatcttcacaaatatatactttgatcattttatcattcccgctttaccgttaaacgctgaacaaaggctgaggccaataaccgcgtttccaatatcatattttcatttcgattaacaattgcgctgagctgactcaagcctaagccccgctcttgtcccttagtcgaataccccgcttcctttagctgccataaaggtggcaaggaatcaaaaacgttattttgaactaagaacaccgtactgtgggccgtaacaaaaatggcgctcatcagctcaccgtgatagtgaccggccgtggcttcaatcgcgttatctaaaataatacctagcgcaattgccaagtctaattcattcgtcgttaccccattaagcacttgcttcaagtcaaattgaactttaactccctgtgattgcgcatagctgagtttgctaaatagaatacttttgaccgatttgacctgaacacgacttaaatcttcgagattatactgctcatccgaaacgcgcttggtcactggggcaatattttgttggtaatattgctgtaagcctgccaaatcatccgttttcaaatactcattaatcgacaacattatattctgataatcatgacgaaaccggcgcaattcattataatgcgtttcgatttcatgcatgtaccgtgtatcatttttgatttgcaggcgttgttgttgaacctggtacttggcccgaatcgtaacccgatactcatcatagatggcaatcgcgagccccataacgaccaacaacacaactaagttactgacgaccattctcaattcactgtcgaggccctcgctgacaataatgtataaatagatggcgagtagcagcaaggccgtaacccggttcagtctgggacgattgaatgtcgtctggatatgcgtattcattaaaatcagattcaatgtgattaaaccaaccagctgtaatcccataaaaatcaaaagatacccgtcatctaatttcaacatatacgttaaaagtgaactgatatgatcgacgacaattgaccagataatcacctgtaggctaacaaataatgactcactgaagctatgtgtatgccaccaagtaaacagcaccaccagtcccaataatggcaatgctgcatattgcccgattactgaaaaaatccagccgctcactaggctactgaccaccgcataactgatatcccaaatactaagtacccgccaatcacgcaaaagcaccttaacaaacaagaataggaacagcgtttgcacaaaaataatcttcatcagctaccccacaactccagcctactcatcattaacaccactattttgccggcacacctattttgattatgactaatcaatacaaccggttccttcgtttcactgaatcgttttgcccactgtaccatcaaagtcccccttacatattggttgctcaaactggtacctacagtttaaaacactcaccgacacttgaaaagaatacacaatgaaccgaattattcaaccagcctttaagatactaaaccgtcatttcaagacgactaatcgctacatgaacgcaaaaaaagacgcgacctaattgatatccactcgtgcctatcaattaagtcgcgtcttttgtcattaaacctcctaatcttgtttcatcgcgtcccaaatcatttggaaaatatcaccaaatgtatattggtcctgagcataccgtcccttactgatattcgtcgtatgcgtatgaatagttgaaaacacgacccccatatgcaaactaaccggtaactgcttaatcaccttagcatcgatagccgccgttaataagttagcgacaatattattcggatcggcatccgccgccgaaatcgtcatcccctgtccattcaatgccttgatctgttgaatgatcgtcaagctatctggattggctaacgaatagtcatacacctgctgtacatataatcgaatccgagtcgtcacatcgattgttgaatcacttaatcggtctaagtcggtagtactaagaattcgattcgtctcacgcgcatagacactatcgatcagagcctgtttattcttaaagtagagataaacattggattgtgcaatgccgacgcgcttagccaccttagtcgttgaaaccccggctggaccctcagcgagaatgattgccgcaaccgcatcttgaatcttaacttgtttgttcatatcttttttcttcatgtcttcagtataaaagataaaaatatctttttcaagcttgacaaagatagaattatcttttatgatggtaaacgttgaaagatagatttatcttttaaaaagcaaaaatcaaactttaaagaggttatataattatgaaaattgcaatgttaggttcattaggaaacattaatcggatcgttgttcctaagctcgtccaagccggtcatgacgtcaccattatctcaactagtcctaagcgccaagcttcaattgaagctgtcggcgcccatgccgccattggtacaatgactgatgttgatttcttatccaccacttttactgacaaagatgtggtttatctcatgctttctggtggtatcggtgatgatcccttcgaaggggccgtggctcaggctaaaatttggaaacaggcaattgaaaatgccggcgtcaccaacgtcgtcaacctcagtagcatcggcgcagatgccgatgaagtggctggctcgctgcatgcttacaacttaattgaacatgaattacgacaacttgacggggttaacctggcttttgtccgtccaaccggattttatgctaacttgttcggtaacttagcaacaatcaaggctgaacataaaatttattccagcacgcctgctgcttcagcacaaaaatacgttgcgcccgaggacattgccagtgtcgtttatcccctaatcaatcacacgccagccggtatcaccgtcaagtatgccttcagtgatacgttcaccggtgaccaattcgttgctgatctgcgcgacgccttaaacatgcccgatctacaatgggtacaaatctcagatgaacaatatcaagctaacttgacgaaccacggtgttcccgttaaaattgccgcttcattagtccaaactagtcgctatcagcgcgaacctgaaggactttatgcagatctaaatgcttctgacactagcgctggtcaagtcaaattagctgactttgtccgtacttttgtggtagcgtacaatagtgaaggcggttaccagtcccatacaatcgcagattaaccgtttacaacacctgaacatttataggaggagtttactatggcttatcaaacaattaatccatataccaatgaagttgttaaaacttacgacaacgcaaccactgaccaaatcgaacaggccttaactaccggcgacgccctttatcaccaatggcgtcatgaacccgttagttcccgtgcagccagcctccataagattgccgcactgttacgtgaacataaagatgaattagctaaaattgcaacaatcgacatgggtaaattactgagtgaatctcaaggtgaagtcgaactatgcgccatgattgctgattactatgctgatcacggtgctgaattattggcaccgaccccaatcagcactcaagcaacgggcgatgccgaaattgaaaaacaagcaaccggtgtcctgatgttggtcgaaccttggaacttcccatactaccaaatcatgcgggtcttcgcaccgaactacatggtcggcaatccaatgattttaaagcacgcctctaatacaccgggatcggctgcggccttcgccaagattgtcgaagaagctggtgctcccgctggtagtctaacgaacctcttcttaaactatgatcaagttagcgatattattgccgacccccgcatccaaggcgtcgcactgactggttctaagcgtggtggacaagcggttgccaaagcggccggtgcaaacttgaagaagagttctatggaattaggtggttcggacgctttcgtcgtcttagcggatgctgatattgacgaagcagtcaacttagcatggcgggtccggttatacaacgctgggcaagtctgcacctcatcaaaacgctttattgtcgctgcggatgtgtacgatgatttcttagcaaagttgaaggaacgttttgccaaattagtccctggcgatcctatggacccacaaactaccctggcaccgatgaattccaaacgcgctaaggaaaagctacaagaccaagttgaccgggccattgccggtggtgcaaccgttgcttatggcaacgaaccaatcgacttacctggccaattcttccaaccaaccatcttaacggacattgatcaagacaaccccctcttttacgaagaaatgttcggtccagttgcccaagtcttcaaagttgattctgaacaagcagctatcgatttagccaacaactctgaactgggcttaggtggcatcgtcttcgccggaactgcggcgcatggcaaagcggttgcccaacaaattgaaactgggatggtcttcgttaacaccttcctcagctccttaccagaactaccatttggtggcgtcaagggctccggctatggtcgcgagttaagcagcctgggcttaatggcctttgttaacgaaaaactggttgtcactgctcagaaacctgactacgacagcggtgctggtggcttagttgttttataaacattagcccctcactacagcaccgattacacgtgcttgaatacgaagcatgcttcaaacttttagtgtcaaaagctaccagcttaggcccgctgaaagaagttcgaatcagtgtaaactttttgttaagtgcgtctatgccgacttttgtcaaaataagatgaacaggccactaactcaatcacacaacaaaacaggctttgaaatcgcgtcgcttgacgtgatctcaaagcctgttttgttattgcactagtaattggtaactaattgttagccaatcttagcaacgtaatggtaagcaccagagttagataagtacttcagccattgatagccatccgcagaaaccgttccaatataataaacggattcgcccgcggagtattggccaacaactgaggcatttagactagcagcggtccgaatattcgttgtggtcttaaatgtgtacgtaccagcagccgccgtcgtcttacttgctgaagatgacgtggtcgttgcggcaccgccactgaccttaacgtagtgttgcgcaccactgtaactcgtgtaacgtaaccaagtttgaccgttagtcgttactttggcgttgtagttgaccgtattgcctttgtagtaagtcccaacagttgaagcggcatcacttgctgaagacttgatggcagtcgtcttagcaaacttgtaagtcccgctttgcgcaactgtcttagcactagccgtagccgttgacttgcttgacgtcgtcgttgttgtggctgcaccactaatcttaacgtagtgttgcgcaccactgtaactcaagtaacgaagccaagtttggccgttcttagtgactttggcattgtaataaaccgtatcacccttgtagtaagtccctaaagtcttggctgaatcattaactgaacccttgatggccgtggtgccagtaaacttgtaagtcccagtttcagccttagtgaccgtcttgctagaactagtagctggcttggtggtagtcgttgacgtagctgcaccactgatcttaacgtagtgttgcgcaccactgtaactcaggtaacggagccaagtttcaccattcttagtaaccttggcattgtaataaaccgtgtcacccttgtagtaagtccctaaagtcttagctgagtcactaactgagcccttgatagctgtcgttttagtaaacttgtaagtgccagtttcattcttggtaaccgtcttgctagtgcttgcggcaggcttagtcgtggtcgttttagctgcggcaatcttaacaaaatgttcgctaccactgtaacttaagtaacgtaaccaagtttcaccattagttgtaacttcagcattatagtaaacgcggttacccttgctgtaagttccaacggttttagcactgtcactggcagcgctcttgatggctgtgttcttggtaaaggtataccaaccagaggccttcttagtcgttgaactagttgacgtattggtcgtagcactagtgtcagtcgttacttcactagtcgtcgtatcattgctactagttgtcgttacgaatgtattggtcccggcactatcttcagttaaaccattgtaatcgatgctgacatcaatgtaaccggtataatctgaaccagatggtaagagtgccgtatcggagaattgccatgcaccatcattggtgttccaaaggttattagcagaaggtgtgtatgggtattgggcccgccatacacgtgattggccaactgtcttaacaacagcatcccgatataagtatgagttggacgtataaacgccgtgattcttgtaaccaaaggaatctaacgttgaccagaacgcgttcaagttcgccgttgcgttaactgagtatgaagatgaatcttccatgtcagcgaacaagagaactttggttgaaacattgttcttaactaagaaaccagccatgttagtcgcttcagatttagccgcatcagccgtgctaaacgttgcatagtggtagaaatcaacgttcaagccagctttgttagccatctttgcttggttcagtgcagctgggttcgtgtaatcagtgccttcagtcgacttaacgatgaccgtcttaacacccgcagcctttaacttattgaaatcagattgcgtcatggtactttgatatgacgccacgtcaacaacatcaacgcgtggccgagtcgtatccccaatcgtccagacatccgttgaagacgtcgttgctgcggtataagcaacggcagcaactttagctgtggctttaatagcggtcgttgccgcgctacttaccgtacttgaagcgggcgtaacagctttgaccgttgcggtacttgaagcagcactggcagcagtactgcttgcggtacgacttacttgagtagtggttgccgtactagaagcgacactggttgcttggcttgtagccgttgcagaagtactagcggctgcactcgaagccgtcttagttgcttgactagtcgagctagatgctgtactggtcgattgactagtggccgcactcgacgatgccgtcgctgcttgactggtcgtcttagttgttgccgcactcgttacttgagtcgtagcacttgacgaaactgaggtcgctttagtcgtcgcatcgctagcagcagagctcgttgcaacacttgcactagaggccgtgcttgcagctgaagacgatgttgtcgtcgcagtcgtaacatcagcgtgcacgtttgtattgttaagaacggaacctcctaaaaatgagaagaaagttaatccagcaaccagccaaagtttccccgacttataaagcttgaatctttccgactgacttgcatcaattggattttgtgatttaaaattcatgtgaacacccttttttaatttacttaaagcagtttaattataagcggttgattgccccgctcgcaaggggatttagtataataattgtacttttcaataaatatttttgataccaacgatatacccggttaatatttcacgaaaatagcggttcaccttaattataattagttgtgagtgaccacttagttcaccaacaattgctaatttgctatgataatatggaaatccgattataaaaatgaagccgttccataattacgcttaggcggaggtcatataataatgaagacttatcaatttgacgcaccgattcaagccgcaacaattggcaaaggtggggcttacgtggcctgtcccttcgatattcgcgaccttttcggtaaggggcgcgtcaaagtccatgccactttcgatgaggtcccttacaacggttctatcgttaatatgggtgttaaaaaccttgatggtagtatttgttatatcttaggtattcgtaaggatattcgtgcaaaactccacaaaagcattggcgatgtcgtcgctgtcaccgtaacggcaatcgattaattcaaatcatcgattccgcgttgtactcgtctatgataacgacccacccccatcccggcggcaatagttggttcatcttataaaacagcccgtatagctggctgtcagctttcaaacagcacgagttaattgaataacaaataatcgcttcaagaatgtcattagaaattcttgaagcgattatttagtaaaggtcattaaaacagcgccgctagttgcttttgactgacaacgtacttttcccatggcgccgtacaaagcccacgctcccgtttagactagcctattcgtcacacagtgaccgttcaatcaaagctggatcaacatgttgatcaccccaggtacaaatcgcatctaggatgggaatcaagctctgccccttagcggtcaaccggtattcgacatgcggctgagcggtcttaaaatcatgccgttcgattaactcatcttgttccaatttcttcaattgactcgccagtgttttatgcgataccgcttgaatatggtgttgcaagtcagcaaaacggctgactttaacctcggccagttcaaacaaaatcatgattttccacttaccacgaatcaactgcatcgtggcatcaaattcatttcggtagcgtggttgcgcagttacccgttcttttaacattattaactccctgctctcaattggtggttacctaaaagtgcgtacttgtcgcgtttaatctagccaagtatactgtaaatcgttgaaaattcaaacgaaaaccattatccaaaattacggaggaattacaaaatgaaaccattagtcgtcattactggagccagttctggctttggtgccgagattgccaagttattcgccgctgacaactacccactgttactattagggcgtcgccaagcaaagttagccgccttatctgcgaactttgaaaatgccatgatcgacacagtcgatgtgaccaactatcaccaattcgaaactgccgttcgcaaggccgaagccaagtatggcaagaccgacttactagttaataatgcgggattaatgttactaggaaatgttcaaaatcaggacccacaagagtggcaaaccatgcttaatacgaacgtgatgggtgttttaaacggcactcaaattgtcctaaatgacatgcgtgaccgggaacatggaacgattctcaatatgtcatcgttagctggcaagaaaccgttcgtcaatcacgccgcttacgttgcatccaagtttggcgtccacgggctatccgagacactccgtgaagaaaatgcgccgaagaacgtgcgcgtcatgctggtagcccccggtgcagccgaaactgagctgttaacccacgttactagcaagtcggcactgtccgattacgaagcatggaaagcttccatgggtggcctgactttggaccccaagcacgtggctgccacagtcaagttcatgtatgacatgccgcaaaatgtcaatatccgtgaagttgacattgctgccacggcccaagatgcttaacctcagctcatttgattaaaaaagccacctaaccgcaccgagctctgccggtgcacggctaggtggcttttacaattgctcataagtacccaatcaacacgctaaaatcggcgtttcgacctcctcacaccgctaatttaggatcattcttccactgctcatttttgagcctgagtcagcgcctgcatcgttgctgtctgcaaagttgctagtaattcatgaatcattgttaaggactccaactgtccacccagtagccattcgcgccaaattgcgtataccccggcactcatgaatcttgtccaatacttaagctgcaccgccgtgagcattccattagtcatcgttgcttggtaataattagtcatattagcgttaaaaagttgttgaataatgttttcaaaaccacgttgctcagccagtcgtaacgtcggcgcaaaatcactaaaaaattgacccatcgctaataacttccgattggccggtacatgctgcaagacgtcctgaaaccgcgctgcaatcgccggggcgaagtacgctgtcaaaagatcttcgagtgtcgtaaagttacggtaaaaggccatccggctgaccccagctcgtttgacaacttgcgtcaccgtaatcgtatctaaatcatgagtccttaataattgtaataaggccgtggttaaataagtttgtgaatcctttttgattgcttgcgcgtgattggtcgctgccataacaattcctccattctgtcacagatgctcgtgattaccttgtattcgtcgtgaccccattgtaagatactggcacagacgttacaagtgtaacagcaattcataaattcatttggaggtagtcccatgcaaaaacaattagtcgtcgtcactggtggtagcggttttatcgccattcatatcattcgtcaattattacaacaaggctacgccgtccgcacaacggtccgctcattagccaaagcacccgttattaaagaaatgctgaccaatggtggtatcaccgacttatcagctctcgaaattgttgtggccgacctggcgcatgatgaacactggtcggaagcgatggccggagccacttatgcgatcgacgtcgcttccccaaccccaaagctcaacttcaaaaacaaagctgaaatgatccgaccagccgttgacggtgttcggcgggttctaactgctagtcgtgatgcgggcgttaaacgagtcgtgttaacgtctgcgtacggggccatctttgctggtcacaaaaatcgtacgaccccctacactgaagctgactggtctgatctcaactggaaagcgatccatccttatcaagaatccaagacacgtgctgaattagcagcttgggactttattaaccatgagggccgcgggttagaattaacaacggtcaatcccgttgccgtcatgggtccggtgttgtccgccaaatattcacattccaatattcaaatccaacaattcttagaaggccaagttaaagccgttccaaacgttgattccggttatgttgatgttcgtgacgtggctagtctgcacttgcttgccatgaccgcaccgcaagctaacggcgaacgttttctagccacaacgggtgagacgctatccatgcttgacgttgcaaatgtcttaagacaggcctttccagcttttgccagtcagctaccaaccaaaaccatctccaatgcagcagttaagctagccgctaaggcccgaccagaattgcgaatggtcgcctcactagttggcacctacgcggaaacgagcaatcataaagcccaaacattgttggattggcatccccgtcccgctgcggaatcgattattgcaaccgcccaatctatgattgacctaggaatcgtcaccaaaccataagcatactcctactaacaccaactaaatactaaccggcaacgcccgcaagattggactcagtattcaaccttgcgggcgttgtcgttcgttatcattgcgatactagcctaaaccagatatgagcctactttttaatttcatctttatattaaaaatacttgcgtaaatgccacttacgtttagtcgccaaaataacactagcaaatgcgtgaacggggattaggaacaagcccacatcgggattaattaacgcgactgttagaaccactaaaaagccaccaaaaacaacacttaatgccggactactcatacgatgaatgtgtggatttaatcttctaacggcggctactagtaactgataagccaacatccaaacaaaacccgtaagaatataaaatactgcgggccattttgaatgcggaaatttagtaatccatgaggccatgaatggaataaaagactgacatagcaaccagaaactattcgccccaaaaacaacccgatcgatttttttgacctgcacgaataaatcgtgatgattaagccaaattgaaatcaatagtgtaaatgtaatgatataaacataaatactttgccattccgcaaagagtgcccgcaccgaaggagtttgaggccgcggtaagtctaatactaataacgttaaaacaatcgcgataatcgcatctgtaaacgcctctaatcttgccttgttcaaataatcgttcctccttataatctatcattactcaattttatgattaataccgcttaactaccaataaagtcaattctgactttattcagcaattgatcaatacaccaagttataacaaccacaattgcatcacacaaaaaagttctttcgagactagtaaccgtttcgaaagaacctaaacctattatgattaattaatcatcacaaggactattcaaattaaggtaaatcattgcccgctgcaaagtaaacgtcataccattcctggcgtgtcaacgtcatatcggtccccgcaatgctctcatcaaggtgttgcggattcattgaacctaaaatgacctgcatattggccgggtgacgtaaaatccaagccgtcgcaatcgcatttttagtcacatgatattgatcagctaattcctgtaatttcgcattcaattctggaaacttcggattatcaataaaggtcccagcaaacatgccgtattgatagggtgaccaagcttggatcgtcatgtggtgtagccgtgaatattcgataatttcgccatcatgattgaggctggccgtatcctgcatattcgtgtgcaacccaaactgaattgggccggtgtgcatgacaccaaattgcaattggttgatcatcaatttctgactgattgccgcttgtagcatctcgacttgcatcgggttaaagttggaaacaccgaagtggcgcaccttaccagcagcttgcaattcatcaaacgccgcagcgacttcggcgggatccatcagcggatcgggccggtgtaatagaaacgaatctaggtagtccagctgcatccgttgcaagatcttatcgatcgttgcaatcaaatgctgcttagaaaagtcatagcgttgaccaaagactagttcaccagaactcttctcaggatcgagtacaataccacctttagattgaataaaaaagtcttcacgctttaaactcgactgttttaatgcctgcccgaaaatccgttccgaatcaccgttaccataaatatccgctgaatcaataaagttaacgccccggtcatgaacggtctctaagacgttcgctgccgcatcggtatctaaacgaaccatccgcataatacccagcgcaaccgcagacgctttgagctgactagcgccaatttgaattgtcttcataattgttatcccctttttgatgaattatagttaaaaacatctgccaacgagactaataatagttgttagagccgactataagtcaagcggatttaattattttttctcctagcttgttacttcgccgccttcaatttgttagtcagcaataaggttggcaaaataataactattgcggcaattgcaatcactagaaagccttgttgaaacgctgctaagcgaattgcttgcaaatggcttgttgtaaagacttgtaagtgagctgcgtcgacgtgatacgttcctgcttttaggtgtcgttcaaacacattcacttggtgtgtggaatacgccgttacaatcgtcgtaatcaaagcggatccaaacgcacttccaatattttggataattctggtcccaattgttgcagctggcacttgtccaggttgcattcctgtataagcatcggccattaacggcattaaaataccaccagcaccaattccccgcacaaataaaacaagtgccaaaatccagtaagacgtctgttgaccaaaccaataaaacggtaaggtaccgacaaacgtgatgacgacacttcccagaaccacgtacttagcgcctatttgatctgttagccttcccgttaacgtccgcgaaactagcattcccgctccctgaggtaatagcgctagagcggcgttaatcacgctcattccccgaacgttttgaaaatagagtggtagtaacaacattgcgccgttcaataccgtcccagcgataaacaatcctaagccagcaccatcaaatgatgcaaacttaaataagtgcagtggcactaccgcccgttctttttgccaagcggcccatacgacataactaatcaacgctatcgcccctagaattaacatctcaatacttgtcgcgttattaaaacggtcagtatgcgcggcattaaccaaactataaatgatagcacttgaggacacaattagtagcaagataccaataaagtccattttcgctgttcgattttgtgccggataattcggcatcttccacaaaatcaaagcgattgaaatcaagactactgggacattgatccaaaaaatccaatgccacgatgcaaatttgataatgattccaccaatgaccggtccgattaatggtcctaaaatcatgggtagcccaactgttgccatcatctggcccatcactgctgcacccgcagtttgcacaagcaaggtcgtcaagagtggcataatcaagccacccgcaaaaccttgaactaaccgagcgataatcaataattgaatattcggtgctacggctgcaaatatcgagccaagaccaaacaaaatctcaccagccacaaagaccgctttaccatcaaaacgattgagtaaccaactggaaaatggcaccgcgacccccgttgccagtaaataacctgtaactgcccactggaccgtcgtcacgctactatgaaaactagtcactaagttgttaatggcaatgttgatcatggttgaatctaataatggtgccatcgcaccaaacactacgacccaggcaatcgtcatagttgcttttgaaatttttgcttttgcttgcatattatcctcctaattaagaaacttaaagtgtcttattcgcataactggtataatacgctatataaagaaaaagtcaataagaaacttaaagtatcttatttaaaaagagggattacatgactaaaacacgtcgtcgtggcgctgaactcgaaaacgccatctatcaagccgtccgtgacatcttaaatcaagatggtcttgaacaattgacgttcgctaacgtcgcggaacaggccggcaccagtaagcctgtcatttaccgacgctggcgttcaccactagagcttgcaattgcggctatccaggaccaaatcattacggaaaaccatggtcaactagacgaagtgagcttgaccggtcagacactttctgaagatttattccaagtactcaagcgcttcactgtcagtattaatacattcaatcaagctttggttatcacttggtttcaccacctagatcaacaagcaaatccagaagttaaggacttgctcaatgctgtgaaaaagattgacgcccatgcgattgaacgcgtgtgtcagcgtgcacagcaacgtggggaactgcgtacggggactttatcgtgcgacttacaactgatgccattcgactggcttcgctaccgtgcttttgctaatgaaccgattactgatgccacccttcatctacttgtcgatgatttattagtccccgcctatcaacacgcgttgggatgatgattaccgctgtctatagacaataaaacgcgtaaattacttattttactgtgagtaatttacgcgttttaaatttttatctcaatcctattatttttcgttataatgattgactaactattatttcaacaagtctgtcttcaccatatcaatcatttgtgaataagcaattggtcccgaatactgccaactgctactgtcaccatactggtacagatggttgttcttcacggccttgatatttttccacagcgggtccttaaatagcgacgcactcttttgactattcactaagaaaatatcatctgcatctaacttagcgagcttttctaacgagaccgccgaccaatccgccgtggccgacttagacacttgtttaactaaacttggttcacccaattgtaaatcttgatacagcaaggccccactggctgaattgtcattgaccatgtaggcggtattattggtgacccacaacaccgccactttatgctgacccgactttttcaacgcttgccgcgtcgtttggacctgtttgtcatacttagcaaggacttttttggccttagcctggcgattaaccaccttagccacatcaaggaaagtttggcgccacgttaccgtagtcccatttttgaccacgtaggtcggggcgattttattatattgcgcatacttgccattggcgactgtactactcgtcccaatcagaatcaagtccggtttggccttggtcaccgcttcatatggtaacgaatagtcaattagcggcacccctttcaactgctctttcaagtaagcctgcgtaccactaccatttttgaccgaccactgcacgaccggtttaatgcctaaagccactaaatcatcttccaaataactcgccacgatccgtttcggatgcttcggcaccttgaccttatgcttcaaataatcggttcgtgtaactgtcgtacttgtcggctgcttcgcaccgcacgcccctaatagtaggcttcccattaaccccaatactaatcccaattttacaatttgccaccgttttgtcacaactgtctccacctttcaagcgctaccaaaattattagtgaaaacactatcaattgtcaataaaaacatttaagataagactatcaattgaacactaattattagttagcagttgttttaatcacgttttccaacaaacaagctggcaaaataagattgtgcacaactaaacaaaattagttaacttattaagcgaacctccttgaacgcttaactttaagaaaggaatcctatttgtgaataccattgaagcccaaaatattagtattggttatggcgacaaggttatcgtcgatcagctatcaattacgattccgcatggtcagatcactacgctgattggcccgaatggtagcggtaaatcgaccctcattcgtgccatcgcccacctattgccaccaacaaccggcgttattctactggatcatcaaaacattcaacaaatcaaaagcaaaacttttgcgaaaaagattgcagtcttaccacagacgaaccaaacggctaacgatctcaccgtagaagaactggtgagttttggccgcttaccttatcggcggccgttaagtgggctcaccacaactgaccatcaaaaaatcgaatgggcgctcactcaggccagcctccaagatttacgccaacggcccctaagcaccctttctggcggacaacgtcaacgggcatggatcgccatggccgttgctcaagatactgacacgattattctggatgaacccaccacctacttagatttgactcaccaattagaagtgatgcaactcgtcaaaaagctcaacgaacaggcccaccgaactatcattatggcattacacgacttgaaccacgcggctcgcatctctgaccaattaatcgcgctcaaggacggtcacgttttggcccacggtcccgtgtccaccgtcatgacggccgctaatttaaaaacaattttcaatattgatgccaccctcgttgactaccacggtaccccactgattttgacctataacggctgtcaggaagtggcccccgcatgaagtcaacgtccagatattgggggtggctggcacttagtaccggcgtgctcattctcgtcatggggctcagtttgcgatttggcgctgaccagatgcgtacggccaccgtctggcacgccctgacgaccacacacactggcaatcttgatcaacaaattatccggcacattcgtgtgccccgcgtccttggagcggcgttgattggggcagctcttgctggtagcggcgccctaatgcaagcagtgacgcgtaacccgttagcggattcaggcttactggggattaacgcgggagcgggcttaatgctaacgctgtgtttagccttttttccaaagttatcaactttacaaacgactggttgggccattattggcgcggcagccagtgccggactgatttttagtatcagcaccgcccgccacgttcaactcgatcctacgattctggtactcgctgggattgcaatcagtagcctattaacagctctgagcgaagggctggcccttgtgttgcagctcaaacaggacctcgcgttctggtatttcggtggcctgggtgccgtcagctggacacaattaaagtttctcggtccaggactagtcttgggattgctactgaccctactactcgcaccgcaactaaacttagcctatcttactgacgacaatgcacagagtttagggaaaagtctcccattactgcgaggcctagctctcatctgtgccgtcattttatccgggatctcggtggcattagttggtacgattacttttgttggcctgatgattccccacatggcgcgttggttagtgggcgctaattaccgcaatagcatgccattaacgttgatccttggtgcaacactgacggtcggtgcggatttgattgcacggctagttaatccgccacatgaaacgccctttggcatcattatctccttaatcggggtaccgtgcttcatctaccttgcacgaaaggagccgatgaaagcatgagccctaatcgtcgcttaattatttggtcactgctcttaactgctagcatgctcggactagcgattctcaaccttagtacgggtacaatgaccatcagctggcccgctctgctgggaattttaactggtcgcggtaatgcgaccgacatgctagtcttagtcaactttcgcttaccacggatcgtgctcgccatcatggttggctgggccctggcattatccggtaacgtcttacaaacggtcaccaacaatccaatggccgaccctagtctactcggaattaataacggcgctggactagccgttatgttactcattattggtgcaggcaccaacgcttcgttaacgctgagtttacctatcgttgcgttagctggggcgtggttaagtacggccctgatttttttattagcgaatcagcgtcaacgagggatctcgtctaagcgcctgttactggtcggcgtcgccttgtccggctgtttttcagccttaatggtgttgatgacactaaaattatcacctgataactatcaatttgtcatgaattggttggccggtagtttgtggggcactgattggtcttatatcggctgggcgcttccatggctggcagtcggtagtggtattctattcattcaattacccgttctcgacgcctttacactcggtacgaccactgcccaaacattgggaatcaacttgaaacgccaacaattgggattgattagcgtggccgccatgttagccggcgtcagtgtcgccattagtggcggtatcagtttcattggcctgattacccccaacctggcacgacgaatcgtgggatcccgacaacgctatcagcttccgttagctggtctgttagggagtacgttattactcgctgccgataccttaggaaaactaatcaccacgaccactgaactgccagccggcgtgctcgtcgcattgattggagcgccatattttatttacctgttagtgcggagataaataaaccttaaaacgagtgcaatcgtgtcgtatgcatgaacataccaactattgcactcgtttttttacgattaatcattaaaatatttggttggcttaccaattctagtcccttgactataccgccgcagggcacatgcttataagcgctctgaatttcaaatgcttacaccacatctttgtatcggcacaccggacaggttatactaatcgtattctattaaatttcgaggaggtattcgtaatggctaatcaaagaaatcaacggatgcaggccacgattctactggcatatgaaaacctgctgagtgacaagccctttcgaaaaatcaccgttcaagatatttcggatgcagcgttagtccatcggtcaactttttacaagcactttcaagatcagtacgatttattggaagccctatttgaacaaaagcggcaacaatcgaagctaactattgaccagatcttcacacatccttttgaaacgctcaactcattcggcaatgcgcgttttcaagaaacattgcgtcatcaatttaacgatgatgcctttcgcgatgcattcctgaattatctaatccatctgtgtaaagatactgttgacgatgatcaacgactagtccgttttctagctgttggccgtatcaagggactcaccttatggataaccgtgggcaatgcgccttataatatattcacggatacggctaccttggacaatatttttagtaacccacttaataccgtgaactactaatatcagttaataaatctggttgtactggaacccaacctaatatttgtcgtgtaagctgactggaggtcggacaattgattaggtaaagcatcgctgtgtcgccaaaactcagtggattatacttagcctttaatggaacatttaacttacgactaatcgtacgcgcaatggccgcggttgtgatcgattcctcggcaactgcgttgaaaacacgctcgttagttgttggatgctcaaggccatacatcgtgactaaataaaacaagtgcgccgcatctaaccgatgaacagcactccaagcatgtgttcctaagccaaagtactcagcacggtggctttttttagcacgctcaatcactgttctagtaaagcccttatcacccgcaccatgaacagccggtgataagcgtacgacaaacgcattgatgttttgagccattaactgacgtgcgacgatctcagattttctcggtgtgagccatttgagtagcccagtatccgcgacttcatgctccgtctcgacatgctttctaatacccgtcgtcccatacgtaacgaccaacggcttattagtcccactaatggcacgccccatagtttcaatggcccgccgatccattgcaccagcctgaaaaaaatgccgaaaatcattgttaaagcccaaatgaataatggcatctgcctgagcagcagccgtcgccaacgttgacaaactagtcaaacttccgcgtacaggctgagccccccaactaatgagtttttgagcgctcgtctcagaacgagctagtccaacgacctcaaaaccattagcgactaattcttgtacaaccgcactacctacaaatcccgtaccacctgttataaacactttcatcaataaccatctccgctcatctacactattttaattaatcctcaatattcaatacttgtgacacacctaattcgaggctttcgttgccttctatcttaacgatgatcacagcgcaaagacagcaacaaagtatccatactattcacgatagcgacacttgtctaaaaatgtcgttgtatttaacgttattatccactccacatgtagacttatctaatcagtagcacctatcaaaatagtcgcgacctatcttacagataagccgcgactatttaaatcacttgatttaatgattaaacttcctgttgtgctggccgtactaacacttcactaatggcgacgtgtttaggctgatcgatcgcaaataataccgcgttagcaatatcttccggatttaaagccaatccttgacgatcgtccgcattcatcagctcactgataccggcctgaatttgcgtattgccgattgtattgaccaactccgtccgaactgcacctggcgacacgatggttgaacgaattccgtgttccttttcttcctgtcgcaagccttccataatggcccggaccgcatacttagtcccgttatacaccgctgatgcgggataaacaacgtgtccggcaactgaatccgttgcgataatcaaaccatcatgttgcttttgcatgattggcaatacttcaccaattccattcaaaacccccataatattcacgttcaacatcatctgccacttatcgtattcgcggtcactcagattaccctggggcatcgtaccggcattattatatagcacatcgacacgcccaaacttggaaacggccaagtcaatcaaagcgcgaacttgttgccgatctgttacatcagttacttgatagaccgcgttgtcaccaatcgcttgactcaaggcctgtaaccgctcttctcgacgcgcccccaatacaactttagcgcctttagccgctaacaacttggccgtggcggcaccaataccgctggacgcacccgtaataacaaccactttacctttaatactcatctttataaaacctccgttaatctacttgctcaattgttttaatcactttagcagggacgccggccaccaccgtatttgctggcactgattttgtcacaactgcgccggcacccacaacagcattttcaccaactgtgacgccagctaataccttggcaccagcaccaatccaggcatttcgttcaatgtgaattggctgaacttcaaccgcatgccgcttagcaggatctaacgggtgattaacggatagtaacatcgcacccggaccaatcagcacgtcatccgctaattcaatcccgcctaaatcagtgatctgaacattatcattaataaaaacacgtttgccgatttttaaattccgcccatagtctgtccacagtggcacgcgaatctcgactgaaatatcgatagtttgacccgttatctccgcaagacgttcacgaatttcacttggttcccgggttacattcaacgcttgaatgcggcgctgattagcatcgacaattggctgaattgtttgcagataatcttgatctaaatactttgctttgatgatacgtccctcccttattaagttaaattcagtatacgagcgttcactatatatgtgaaatgcttatgttaaatacacattcataggtttaaagcatagaagaactctgctgattatgttttaaatcgccaataactactgcacgtcataattaatttaatgcttgctatcgggtcgaccccatagtttatacttgcgcataatcatcgaattgaaggagtgactgacatgcaatcaaaattagctgttattattggtgggacttctggcgttggtaaacacaccgcaattgaccttgccaaccaaaactatcatgtgattatcgttggcagtcgggctgacaaaggacgacaggctcaagccgatattagtcaagcaactggcaatcaagctgtccaattggctttggccgatctgagtaccaaaactggtgttcaacaatttgctcatcagcttgcagccatgacggatcacatcgatattctactcaatagtattggtgtgatgctacctgagcgacatttatcggcagatggttatgatttgaacctagttttaaattacctcacccatttttggaccattcaagccttgttaccgttgctaaagcacagtgaccaagcgcgcattctattggttggtgccctgccattcgtgattaaccatgctaaagtgagtcttccagactttgacgccccggccacatccaagtacaatgccatgaccgtcacagcccaggccactgctgcgcgcgtactactcacgttagctctcagtgaacgcttaacagcaaccaacgtgacaatcaacattttccaccccggctatgtcccagattctaactttggtgctggcggtagttgggtgagtcgtttggctggtcggatactgggtgaaagtttctctcgcaaaaattccccgattggtgcatggttagctactgctcccgaactcactcacacaagtggacacttctacgatgaccgcctacgtcaagttcggttatctaagcagtacactcgctctaaggccaacgacttatggagactcagttctcaatattaaggagacgctcttgttaacgtttaaaattcctgagcaacagcattacttcactacgaaggaagtcaccgcgatgactggaatgactaaggatgcgttacgatattacgagcaccttggcattctgcctgatgttcagcgaaaccaatacaattaccgtcaatattcccacaaaaacttggaaacactccaactcattaaaatatttcgggacttagatctcgatttaagtctattgacaccagcccatctagcactagatggtcaagcaaaagtagtcgctttcaagcagtaccaacaagtcattcgggatcgcatccggcatctggaagcaatcgatcagttattggcaactaaaatcgactactttgaacatcaatccattgatacttaaacacaacaaaaaacacttaacaagccctattcccattgacttttcgccaatgctaggatgttaagcgttttttgttatgcacagttaaaaaaattcattacttttcatgccgcttacgcttcaagccaccaaagcccagcaataatgttgctagtgttagccctagtgtttcagcagccatttcagaccaccgcgtttcaccagtctgtggcaatcgactcgttgtatctgcttgagccttgtgagccggctccgttactttacttcccggcttgatgactgctgataccggagctgttttgacagccttaatgcgactcgataccaacgtccttgtcgatttagctggcgtctggttgccagttgtggcttgaacagccttcacaaccattgccggcttagtgagttgcgttggtttagcagccgtgattggtttcgtcgttggcttgattaaatcgtccgatgttgtcggcttacctggctttatcgatgttgggacgtccagcgcatatgttagcgtttggacatcatcagcactagcagccgtgatggctacggcctgagtggtcgccgtcaacgcatggtatttcgcaattgttggcgcagatatggctgtaaagttcaacccggtcggtgcccagtcacgatacgttgccacaccagtcaccgcatcttcaatcccagaacgcgtgaacgtcagcgtccggatcgtatcagcttgaagcgtgtgcctagcctgatcctgatagtgaaccgtttgcgtgatcgttttggtgagctgatctggtgccgtaatcacgattttgttatgagccaagtacaccgtatacttctgaacgacgcccgcctgattaaaagtaacacccgttgccggataatcactccccatcaagacatagcctgcctgggtatactgcgcaatcattgtcgttggttgataatccgcttgcgtaccgaatcgtccggttaacgtcacgcttgtacccagtcggtggcccgtcgtggcatcgacataagtcaccatcgccgtttccagatttgcttggtaagtaaccgtttgtcgcgactcagtatctttggcactgacagttacactagcaacacgggttgcgttcggggtgtagccagcaattattggcgattcaacgactgcgtatgcccccgtcaacgctgattcaggtgtacgccaatccatatacgtcaccacctttgtcacttggtcaaaggtcgccttgcgctcaaaactgaccgtttgcgtgacggttggcgccgcagtttgaccatcattgtaaacataggtaatgactcgctgaacactagttgttaaatctttaagcccagtaccagctgggtacttgggcccttctggatgagcggaatcaactggttgacctggttgaccaggcttagttggcgtgaccgtcgtcatttgatgcgctagcttgaccgtgtatgacttaatgacgtcattttgatcaaaggtgataccagtcgtcggaacattattcgaaactaatcgatagcccagttgttcatacgcagcaatttgtgaaacgggcgaataactattcgtagtgccataagcaccagttactaccatcgtaggtagtgttttaccactcgttacatccacaaacgcaacggttgcggtctgcgatttggccgtgtacgtgattgcaatcgagcacgatttatcgtgactagtgaccgacgttgcttcgacttctgcaacgctggcttgataacctgtaatcgttggtgacgtgaccgcggccaatagtgctgactgaccaggtgccactgtccagtcaccgtaagtcagctgcttacccgttgccatgtcgaaagttgccgtgcgattgaacgtgaccgactggttaaccgtttcagccgctgattcacctgacgcatattgatacgtaatcgtccgaaccactgtttgttgcaacgaatcacgaccagttcctgccggatatttaggaccggctggataatcagcatcgatggcctgaccaggttggcccggatgatcaacgctgaccgtcacgtgacgatgcgctagtataaccgtataaacttgggcattctgattataaatcagctgattaggcaaatccgagttaactggttcatagcctaattttgcatacttcgcgatatcagcagtgaccgtatagtcggaagcatcaccgtatttcccattcaaatcaatataacttaagacttggttatccgtagttccatcgacaaattgaacccggatcgtttcagaattaacgctgtatcggaccgttgtttccgtagtctcgcccatgctagcgggtacagccgccgcgatagtcgtttgacccgccgtgtaaccagtaatggtcggcgactcaatggccggatagctattcacagtggtcgtccaattaccgtacgaaaggaccgttctatccaccgcatccaccgttgccgtgcgcgtatacgtgaccgtttgaagcacatccgctaagtccgtgggtgtgttatcagcataaacgtaatgaatcgttcgctgactggtcttcatcaaatcactaacggccacgttacctggctgatcaaccgtcgccgtgatggtgccatgtttcaggtatacgtagtaggtctgttcagtatcctgatcaaactcaagctgcgctgggacctcatccgaagctagcacgtagcctaatttttcatacgccgcaatgtcctgcgccgtcgtataattcgtgtgtgtgccaaagctcccactgaaggggacctgatataaaatcacgttgttcttatcttgatcgacgtaaacgaccgcaatcttttctgtgttcgctaaataggtgtacacgacctgcccaccaatgtccgctaaagtaccatcggcttggtagccagtactttctggttgtaacgtataaccagttttggcatgcgcagcagtcgtatcactcgtggtgtagctcaaatagcccttagcggtaacatcagtcccgtgcgtcgccgttccattagccgttgttaccacgtgtagcgtccccgctttgtcgcggtatccatactgatagacaaccgctacggcgcccaccgtcaactgaccactaggcgaattcgtcaatttataattactattagcagcggcattcgtcagcgtggccgtaatggttgtcgtgtccggatcagttaaccctgacgttaacgtgtaatccaaactttgccccgcaacaacaccagtaatgaccggcgtaatattttgttcctgaccattggcccacagaatcgtatccggcaaggtaatcgtcactggacgttgagtaatcgtcagggtcccaccaacattcacatcgcctgcaatcaagaagtctggattagcagcggctaaggctgccatcccggcgctgttcagcgtgacggcgtaagtgcccacgttctgatcaattgcagtggtattaaggtagtcggtactgacttggtacgccgtcgtcccatccatagccgtcgccgcgctatcagcagtccaatcgcttggggccgtatattcagttggcaagtataccgtatagcaacttggatcagtcgtggcgttgttatcatagacttttgaagctggtgcaatcgttatcttggccgcagtatcagtcgtcgttgtgacgtagcgctggtaagtaactgtgtaatttgaattactatcaccagaatatgtctgagttaacgaaactgcactagtgttcaaataatacgtcacgccattttgtgtaattgtcatgggtaatttagtcatcggtacatacgtcttaccactgtcgcccgtaaaagttacttcgcctaatgacgtgccatcgtttcctactaaactataagtatcggtaatcgttttggccgatagcgtgtaatgatataggtaacttgtgaaaccactaccaatcgtgacagcatccgcaattcctaatgcatcagcgacactgtcaatattagtataattttgcaaattcaacgaataactaccattattttcattagaatcatcagtaacataaaccaccgccgaatccgggcttgaaacttgattaccaattaaaccactagtcaccccagtgttttgaacagcaatgaccggtaataatgcatattttagcgttgcaaatgcaccaccatcataaacagtggttttatcaaaatgaattttaaatgtttggcgacccctgtagtctgtcagttgggtcacctttaacccctgataggtcacatcatttttcgtcatcattgcttcaatagcagacgttaacacactacttggatcagtcgctatgttaatagctccttcactattagtagcaaccttaaaaccagatggaataataacataatcagtaagattagccacagtcattcctgatggattcatattaataagcggcaagatcaaatacagcgcctgaccatatgctaaatcaattccctttgttcgggcatgtgaaattgtcagccctgttaccggagtttcggcactagcctgcgcgccatagtttgcaggtgagatggcaactgcggcactagccttgacaagcactacgcccttaccaaccgtcgtactattaaaagtcgtactgctgttaaggttagctaatgtttctatcgtatcatcagtcaatgtaatggtgtatttatcaaccacagcagtattaaccgcttccgaatatgtcgtatcggaaacggggacgtcatacacaatcgcatcagtctgaatatcatcgtaacgaattgtccaacctgttggaaccacaatagtacgactattgaccgtcaccggaaccgtactagtcgttttattaacgacaattgtcgtcgcacccatcgtaataatgtcatgtgccgcaataactaaactaccagcaataatcgtatcagcagtaatagcagcattaggattagcctgttgtaaagctgtcaagccttgatctgacaacacaagctgatacgttccagattgggttgctgtgggaactataacatcgccactagaacttgcaatcatataagtattagtcgttccatcagtagccgaactagctaacgtccaggtgctgggaactgcatactgactcggcaccgtaattgtatacgtacttggtttagcatccccatagtcaatactagctgaaccaatggtaattatcgcagtcggtaccggagcttgcttgattgttagtgttcctgtcaccacgttagcagccgttatatccgcgctactattagcttcagctagcttagtaattccagccgttgagagtgccaatgtgtatgttccaacactcgatccaaacttggacgtatcaacgtccgttaagtcagtaaccgtataaacattcgcagtactcgttacagcccaatctgagggcgccttagttccgtcagttagcgtaatcgtatagcgatttggtgtatctatcttaccatcatacgtcttagtcgctgaatttactgtcgcaacggtggccacagtagctcgtgctagcttttgcgcactgcgaatggtattcgtactaatatccgcggttgcataactggcagttgtagttgttttcgtagctactgtagccgtatttatcttgccatcagtggttgctctgttggcggccttagcttgatcctcaatagttgcggtacttgccgtactgtctgttgtaccacctactgcttgattctgttctgtgttgttagacgtcgtatcgactatggacattttgctggtctgattagtagcaccgtttgcacgtgttgtttcagtagccgtactagtcacggtggaatcaaccacagtctgagtcgttgattccgttgacttagcttcagtcgatgcagtaacattactagcttcactactcgtctctacctgactgttattagttttttcttcgccatcattagccatcgaactactaccaaccgacttactagccaatgtaacttggttgccagttgtctctgtccccgtcccctgttgctcagcagtcgtactagtcgtgtctgcccgccccatcatcggtagcagactagcacccaaagtgaaagtactcaaccctgcaattaaccacaggcgtccttttttatacattttataagttcgtttttctgttaattgtgctcgttgtaagcgtcgtctttgcattctatctaccccgaaacattttcaattagttataacagtattaataccctatatatctcatattatcaatcagtatacacctcttactaacagtagacctaataattaacggccaccaaagttttgatataacaacactttactgagaactcaacttcaattcagcacctatagtcatgatatatactataactattttagataaacatagaaccatattctccaacaacatttatacattaattataaatatcgccaaaacatctaatcctcgcaacattactttaatagtatgccggtattttccaggtggttactagtcactcaatgttcgttaatttctgttttatatcaaacaattcaaaaagagcatcttcagaatattacattccaaaaacgcccttgatatccactattcatgttaattgttaatctgtgctaatcgattaaactgcacttgcgtcttgattatgattcactatcttgacggttcttttcagctaactgtttctctaacgatttaattttcttctgtttgcgccaaatataccagatcactaggataatcaataataacagtaataacccaatcccgatatacaaccaccagttaggcccttgcttcaaaaccgctgtcttattcaaggtatccgcctggccctttgtaatcacaaaattctgcttaaattgccagtgttgcttcttggaagtgactttcacaacggccgtgtatttaccagctgctaacgctttttctcccgtctgcaatggcaatttatagattgaattaggcgccatctggccgttcgctagcttttgatggtagacaacttgactgccaccccgatgataaattttgatgttagtttgtactttatttaagtaagccgccgtatggttgactaatggaaaattaatagcattgcgcccattgagctgtttgaccgtaatcttattcatcgtcagctgattggtcgttaggtctttactaccatgcaaaattacagcctcagtataagcgtattgattattgactgccacggcctttttagtatcagttgccgtggcctttttcaggaaagttatcccacctgctaaaatgccttgataacttttggccggcatcttaatttgaaacttgaccgtcttgacttgccccttagccagcttgacttgtggttcatcagttgtcactaatttgctaatatcatacgacaaattcgcactgcgattattcgtatgtttgtattccacaaccccattaatatttgtcgtggccttagcaatacctatattgattgtaatgggcgcactagccgtattatgaattttgaccgcaacggtttgtgtttgtcgcggttttaacttcaaatcaaagtaagagagacgcttatcgacctgactgctagactggactggcgtgatttcaaaaccaacgccctgatcagcagaggccgcttgtcccatcattaataaactagcgacaaccgccaataacattcccaaagataatcgcaatcgtttctgcactttaaccccgcctttttctcagattatgtatcgacattggccgtagccaacatcggctaactattcacccggattagttttctggtgtggcacttaagttccaagttaacgtggtggtgtaccccgtagctaatttagtcgttttcccaggaacagccagcttagaatcactaaatgtcaccgttgatgccccgttaccagtcccattcttagcagaagcgacggtcccagctgcacccgcggcagaagttgtccccggcgttaacgtagtactgccatttgtcactgccgaatcactctcagtacccgcaactgtcaaagcagcattcgtcaaggctgaaccagcaccttcttcatctgtattgaattgttgcccctgagcaaccgtcaaggtccagcctgcactagtcccacgcaagtcgcttaccgtaatagttggtgtcgatgaagtggctaaggtggcatcgctggaggtaatcgtgttgctaccgaaagctaaatgagtagcgtcaacactcattgacaatgttcccccagtaaatgttacatcaccggtcgaagaaccagtcgtatcagcattagccacaaccgttgtggctcccaaaagtcctgcagaaatcattaatcccaaaacgaatttcttcattacaatacgcttcctttcaaactaagctgtgtttttaactatgaatcactaattaattattggccacggtattattcaaacgccatgaaatcgtgccttggtatgtgtcagccatggcagccccatttgggacttctagtagcaatcctaagttgctggaccaatgttccgaaatatcaacacttttatgatcagtcgttgtctgtgagtagacttgtacggctaccccaggtgacaaggtcatttttccatcatcggtctggtaatataatgtagccaacaacatttttccagtgtccgctcccacaaagcctgaactatcgagttctgcagtcaaattccaggttgaacttatttgcccattgttctgaaccgcaagtgtcttatccagagtagacgcataagtttcagttgttcccgatattgtatgactgccaaaatcgagcattgttggtgacgaattgaagaataagttaccatcgtacacataggttactgtaatcgtcgaagcgtcatacgttccagttgcattagttggcgttgcatgaagcgtataaccatcaatcgttttggccgttgtttggtaagcatcacccgatgtcccggatgacgtctcttcatccgcaatttcaacaccatcgccgtctacgtatttgacaagcaccgttccacttgtcttaacccagttataggtccccgccatggttgcgccatcataattagtcattagttccgccgacgtataggttggatcatcattgttcctttgccacgtcccattgtatggtagttgtttgcttggctccggcaagtacatcgtcttatcattatgaaacgtaaaattaggacctagtgtcaaatgctgtaatttttttgaaccattaaaaaaattcccgtaactggcggtagcagattgaagatcccagctacgaagattgagagttgttaatgatgagcaaccgccaaacgtccaaaaacaatttgtaactttactagtatcccaagtatcaaccagcaaactagtcaacccagaacagttataaaaggtggaataaagagttgttacagaaccagtatcccatttttcaagatttaaagtcgttaaagaactgcagcctccaaataaaaatgacatatccgtaaccttactagtatcccaagtaccaacatccagcgttactactttagaacagttttgaaacatactccccagtgaagttacttgggaagtgatccatccagaaacgtctagttggatgacattttcacaataaaaaaacattcgagacatgctagttaccttcgctgtatcccaaccactaacattaagttcagttgccaaagtacagttcataaaagtagcagtcatatcggttactcgtgccgtatcccaaccacttgcgtttattatctttactgaagaacaactataaaatgtagacgctagtgttgtcacattagcagtattccagcgactgacatctaactcaggcagtgaagaacagccagaaaatgtactgtctaaattagttacttgtgttacatcccagttactcacatcaagcatagtgagttttccacacatgtaaaatgttctcttaaaactctttacatgactgacattccagttcgtagtatttactttagttaacacgctacacccttcaaacattgattccatagtagtcactgttgaaaaatcggtctgtccaaaatcgactgaagttaacttgctatcacgataaaacatagactgggtactagttacaccactcatcgaaagcttatttaaacctgtgactgttgctacgttagcgaggctagcaaacaagtatccataattcgaagccgttgtgaccgtaatttcatccgtaatctttatattcttaatcgatgaagcataatcataccaaggcgaacgtttaccagttaaatcagcaaagctaccaccactaagcgttaacacccctgcgtcgtcaatggtccatgctaccgtcccaacagttccagattccactgccgtgtctgccgtctcagtggtatcattacccgtcgtggtactagtcgccgacgtactgtcagagctactcgtatcagacgtgtctgttgtactcgtcacatccgcactcacggccatcacattggtatcagtaactttgctaattgcgctgctactcatcgtcgaagaactactagtgtccggcgcggccagcgccaataacggtggtattgccatattcaatggcgcactacctcctaaaataatactgataattaccattaatactttacatattcgccgcacccgaccatctccttttaatcagcaattctatgtgacagcgtaatcttttaacttcagtcattgatagcgctcacatttatagttaccctaactagcaatcaataacagtcccagtagtagaacacctaatgcaactagtaaccattggcacacttgctcactagtcggtggtaaccggccttgccaacgattagcctgcacggtagttacaatataacgcaggctattttggacttctgatccgtactggcgtctttttgcaccgtttcttaatcattatcgccctttattagagactaacggctcagccgttaacctttcatccacagtttgattataaaaataaatttaatatcgcgctgatacccttattatcaacaatagataacagacagtattgtttcccctgtttaccgtataattataacattattattttataatggttaaaaattttaacgtatttattgcatttatccacccctgttaatccagaaggcttacgtgacagttagaccgaataaaccggatggacaccattaatattcggcctgattatcactttccaaaatatccgcaaactacacatagcgcttttaatcacccaacctgcctagttatctaatcattgccagttgtaatgataaatcccactaaataatgcagctctgctctccctttaactccgaacttattccaatagaaattataattaataccatatatttaataattaaatattaaaaggaacgaccttttgttagtttacgaccaaagaagactcgttcatgacgctcttattggaagactatcagcggtactttacacaactcaagaccgacttagcccagcactcaccacttcaatcttgacccgtggttatttttggcgtattctggttcaaagataaccaccggtcatttttaaattaggaggatccgacatggctaatatctatacgcccagtcaaaaagcagccaagcgtcaagccatcatgacggctgccattaatttatttgcccataggagctatcccgaaatcaccatgcagcaaattgcggaagccgtcggtagctctaagggggcgacttttcgctatttcacgaccaaagaagacttgttcatgacgattttattggaagactatcaacaatactttacccaactcacgaccgacttagcccagcaaccaccactatcagctgacgactttatcgcgtggatgaccacccaaactcgccaattaattgaagaacatagcgttctgattcgattgaatgccattcgtggaccaatcctagaaggcaaagctaacatgcaggaaaccatcacacaacgtgaggccctgtatcgcgccagtcaacacttaggacaacaactcgttatccaaacagaccacttattagaccagtcccaatttagccacctgttcattattcaaagtggcattatcagtgggctcataaatatggcggctttgaccagctttaatcatcataaattatccgttgattatcccgacttcgaaattcgacttataccggaggcccaacaacaaattcgttactacttgacccaatatttgaaggagttttcgcacaaatgaaacaatcccatatccgtaacttcgccatcatcgcccacattgatcacggtaaatcaacgttggcggatcaaatcatgtcgctgacccagaccgtcagtgcgcgtgaacagcacgcccaattattagacgatatgaccgttgaacaggctcatggcgtgactgtcaaagcacgtacagttcggaattactatcaggccgatgatggtcaagaatatgaatataacttaattgacacccctggtcacgttgatttcaattacgaagtggctaaaagcttggctgctaccgagggtgccatcctattagtagacgccactcagggcgttcaagcgcagaccattgccaattaccgaattgccaaacaacgtcaattaaccttgataccagttctcaataaagttgatctgccctctgcggatattgacgctgcgttggcccaattgaacgacctcgactcagctttcacacccgagcaagtcttgcaaatctccgctaaaaccgggcaaggcgtgccggccgtcttggaagccatcaagcagcggttgccagctccccaaggcgacttacaccagccgctgaaagctttagtctttgattcgttgtatgacccatatcaaggtgtcattgcctatgtccgactgattgatggtcagctcaaatcacaacaagcactgtgcttaatgcaaggacaacaggattttaacggcaaggccattggtgtcttcgcgcctcaaatgcacccccaagaatcgctaagcgctggtgacgtcggttacgtggtcactggtattaaagatccacgaaaagtccgtgttggtgatacgctgacgtccgtcgccacccccacgcagcggccgctagccggctaccaaccagccaaatcaatggtcttcgcgggcttatatcctaagaataatgactatccggcacttaaggaagccgttcaaaaattgaacttgaacgacccgtcatttacctatgttgaagaacgatccgaggcgcttggcgttggcttccgttgcggatttctaggaacctttcacctccaaatcattcgtgaacgactccacgatgagtacggggtcgacgtgctaacaacggctcccaatgtgacttaccacgttacactcaccaatggtcagcaagtgatcgtcaataatcccgttcagtttccggcattcagtctcattaaagaagtgactgaaccctttatgaaagccgagatcacgatgcctgctgacaatctaaatgccgtattaaagcttgcggaacagcataaagggaccttgatcgacttggcaaacagcggggacttgattgttgcaagtctcaagatacccttgtcagaaatcgcctaccactttttctcagaactaaaatcagtctcacatggctttgcgagtttaagcaccgcctttatggctaatgaagtcagtgatctagtcaaagttgaagttgatatcaactatgcgcccgtagatgcgttgaccttcatcgtccatcgtgaagacgcccccaacatgacgcagcaattggtcgccaatctgaagacgacggttccacggcaactatatcccacacccgtccaagcacgtattgaaggtaaggttatcgcccgcgtcgatgtcccaccattgcgtaaaaatgcagcggtgaacggcgaacaacacagtacttccaaaaaagcggccctactacgacggcaaagcgctaataaacgccgcgcgtccaaaaatacgattaagctgccacaaagtgtttttaatgcaattttaagcctttaatcaagttagaccatccgttgatttctgggtttcaatcaatcgggtgaaactagcccttgcaatgcagccaatcagacgttggttttcacgtttaaacaacccagcattaatttttattatgacactcgccggcgagtcattgttttgactgacatcctaatgaccatatttgacatcatgcacaatatcagtccccggatgaatcaagtggtggcattgccgaactttccaaacaactaatcacactcgcttgcaatatcccaatcaagttctggcaatcaacaaaaattcccccttattgatttaaacactgacagccaacttaatatttattaccaactatttaattgcaggtttctagtcttaaaaaggcaccccaatacttattcacagtgaataagtattggggtgcctttacatttgagacgatcaccaatcaatatttcgacttgccacaccaatcttggattatcccgcttacttcacaccatactccagaacaaccatctcagccatcgtaatttcatgatacaagcggttaaacaagtcttcgctaatggcatgtgtcgcatcgtattgtcgctgcaaataatcgcgttccgtttgaaatacttgtcgataaataaccattagttcacgcatttcatcagcagtatattcaggatgttggaccatccgacgccattccgaaataaactgtcgaactgtcgtgtgtccattctgtgaacgtaggtcaaacgtcaccgcagctttaaattcttgtgaaatcggcatttgccacaaatcatgaactccagcttcaatcatctgttctctaatcaccgccattttggccgcaccatccgtatcagtcttaattttcggcaatagccagcgaaaaacaatcgttggtactaataagctcaaaataatcaataagctttcagacatcaagactaaattgaaatcagtcgttttaacttgagtttccgcaacggtaaaggccaacgcaaacgtcacagcaccatgaatgccccccaaagcaactacccacgcttctcgattagggacatgatgaataagtcgaacgtaaccataacgtgctaatagattggccacgtataaaataacaccaattacaatccagatcagtgatccattataagagacggaatgatccaacgcggtccgcaataacataattcccaatacaataaagaccacactatttaaaatatcgctcaataggccaattaattgataaatatcactggcgagctgaggattggctaatgcactccgctccccttcagcattatgaactaatcccgcaaatacaacagcaatgataccggaaacaccaagtgcttcagcaccaaagtacaacacaaatggtgtcattaaataaatcacttttaacggagtaccattattatacgtgttattaataaaattaagtttagagcgcaacattaattgtcgaatataaacaattaagccgcttacaaggccaccaaaagcaatccctccaccagctgcatagacgaaatcccataaggtctgcgaataattaatataaccgttaacataccacagaatagccatgtttagcagaatgattcccgaagcatcattaaacaatgattctaatttcaaactagtctgttcacgctgcggtagcacccggcccatcgtcaccgactcagtagccgttgcgtcagttggtgtactgatagcagccaagataaaggctaatggtagtccaacacccgctagcaggctagtgccgagtccagccatgactgcacataaaatcaccatgccaactgtaagactcacaatttctcgtacgtgacgaccaactaaattcagccgcgtattctggccttcaaaatataataatggtgctacaatcagtccaataaaaatatctgaattgaacttttcgataaggccatttaagaacgggataaccgcaatccccgccccaataaacatgctcacatagttgaccgatagtcgtgggagccaacgacggttaattacaatactaaccattgccgcaaccactaacacaccagtcgaaataagtagtgccattctgcttcacccttttttaattaatataactaatattgattattatcagtttagcccatcttgtaaagtaaccacactttatgacactagcattaattgacttcaagctatggtctcatagccgactaaataactgcttgtatcgctactaccatcattttaaataatgatcgtttgtaggaaagccgccttaaactcgaccatcacatcaaaatagcgtaccaagaatttagctttcaattctcagtacgctatcttattaaaaacttccgtttaattttcggtataatgtagcataattctacttctcctgatgatgccgaaatgcttcaatcatcgtccatgtcaggctcgtgttcgtatcattatgaggaatttggtcacgctggaaccattgggctttcgatagttcgtccgtctctagctcaattgccacgttctcattaaggtccgcaaaatagccggccagtaaggagtgtgatggcgcccacggttggctaccgaagtaccgaatattatgaacttcaaggccgacttcttcaaagacttcccggcgaacggtatcttcaaaggtctcaccgatttcggtataacctgaaatcagtgaaaaatgattgtagccggataaaaacttggtcatcaaaattttatcaccattcgtcacgccaacaataatcgcaggcataatcgtcggataaatcgtctgaccacacgctgcacacaccagtgaccgttccgtggcgcctggatgtaatggttggccgcaatgcccgcagaaccgcttcgtatcataccaccaagccaaatgggcagccgtcgcactactgaaagccaaccaggccggtgttaggtctcggaaccctcgagtggtgccaacggtatagttatcattcgcaaccgcatcaacatcgacccagaaaaaggccgcctgatcaacagccagcaaatactgatactggtcagggctaaacgcgtaatccgcatcgatatcttcgtacttgggcaaggttccattcattaaaagcacctgttgttgacgaccaattaagatataatcgcccgaccggggtgcccgctgctgatcattctgattttttaaaacgtgtggttgaatatcttgaaacatgttgggcccactttcctgtataaattcattagtttgagaacaatggttttattataacggagtcactgaatttttacaggcctgcaatctcagccggtccttttacttaagcaagctcaccgtatcagtaccttctcactgtgaggttaatcttctactcgtcagatttcgcgttcgcctttaaccgctgtaccaatttggctatcaacggccgggaccggtttgattttaataacgccacgatgtcatagccttgttgcgtagcatccgtaatcggcaaatacgcgacttgttcatcatgctcagttggcactaaccccgcaggatagaatgccaaagcttggttcaacgcaactaacaagtgcatctgttctgcactagatactcgccgaatctgctcatagtcttgaataaacggggcactagccaaaaaactttctaataaaaatgttgagctttctggactgtaatataaaatgggcaaagtcgccaacgcactcggtggcaattgtgacaatcgactcagtggatttagccggctcaccccaatcaccatttgattatgataaattgggacagcggttaactgtgattctggagtaacggcgggacggccataattaatcgatagtgctaaatcaagtgaaccatcagctacttgctgcgccagatgctcgttactaccttggcgaacaacgagttgcagctccgaatgctgttgctttaaatcgtataaggccggtaataggagccgctgctcaaaggctgagaaataaccgactcgtaagatttgatcagtaggaacattaaattgacgtaactccgtcaaggccgtcgtatagttgttcacaatatcctgagcagatgcccaaaataaccgcccctgaggagtcaattgaattctgttctgtccacggtcaaataacgtcactttcaattcattttctaactgggtcatttgctttgatactgtccgctgtgaacgatattcacgggcagccacttgctgaaaactaccatactgaacaacttttaagaacgtctgtagccggtcaagatccattttttcaactccatccgcacgattgattcgcctgccgaaccaaattgtctgtttgctaaccaccatacccccgttatgatgagggtgtgatagcggttacttcattatagtaatggtgaatttagccgtcaaatgctcattagataacaaatcagtttggaggaattgacatgacgttagcaaaacatgattcatacgatattgtcgtcgttggtaccggagcagcaggaacagcggcagccctagaagccgcacaacacggcgcgtccgtgttattactcgaaaaaggacgccatactggcggtagcagcaattacactgagggtctctttgccgtcgactcatacttacaaaaggcccaaaacatcaacgtttccgccactgacgttttaaaagaagaagtcgactattctaaatatcgcgctgattctcgaatctggcgtcgttacttggacgatagcgccaacacggtgcaatggcttaaagatcaaggtgtcgaatacgaaggcgtacaagcaatgggtgccggcgaagccacgtggcatatttataaaggaatgggccaagctgtcttacatgacgctttacaaccacaagcacaaaagctgggggtcgaactactgacttccacgaccgccatcacgctacatcaagccactgacggtgcaattaccggtgtaacgattcaaagtgccgccactaatgagacccaagtcatcaatacggccgcagtcattcttgctaccggtggttacctcaataatcccgacatgatgcagaagctgacccactatgacacgcgccgcttaattccagttagttcaggtaaaggaactggtgacggtcttcggctagcgtggcaagccggtgcacaacaatatggcacggggatggcgatgctctttggcggttacctcaaagatccgagcgaaccttcctttaagtacatggcctcccagatggaaacagcggccggccagcaaccgttgctctggctaaacgaacatggggaacgatttgtcgatgaagctgtcgtttataacttctcatacgccggcaacgcgctctacacccaaaaccaagtattcagcattctcgaccaaggtgtgatcaacaaaatggctcaggacgggaacttcatgggcttaggtgtttacgttcggcggggcgaaaaaatgacgaaactccaggctgaaatcaatgcagccgtggccgccaataaaccatttatttttaaagccaatacgattgaagcactggcgaccaaaatgcacctacctgttgatcaagtcacccattccattcaaacttacaaccaatattgtgataatggtcaagacgatgatttcggcaagaatcctgaatatctcgttaaagtttcgcaaggtccattttacggctttgaactcaatgttggtgccttttgtaccatgggcggtctcaaagtaaccactaataatgaagttttagacactactggtcagccgatcaccggtctatacgctgctggcaacgacgccgctggactaactggtgatacgtatggtcctaacatgcctggaacctgtgttggctacgccttctactctggacgcaattccggtcggcacgcggcgcaatacacgcaccagcagtcaatcgttagtcattaattccttatttataaacctataacgaccttcccagaatttatccggaaaggtcgttttacgctgtcttcacattgatacgctgatgggcagtttagtgactaccaatttcaccgcaacctcgcaagttaatcggtagctctggcttgagcgccattcttaggcaagtttaccaacttgcctttgcgaaccaccaaactttaaaaaaacaagcatttcagcgctaaaagcgtgcacttcttaatgtccatccgttctaactcagctcaacatcggcgttaagtaccgtcaaataacggtttgtttcatgattttgaaaagcaccggcatccagccattcacaactaagtgacaagacgtccaccaaactggctagacccgccaaaataatggtgctacactttaactaatttagtgtgcttatgactaaatcaatcatcaaaaggagtatgattattttgaacaagcgaaaaattatcactaataacccaccaaagtggcacttaattactgggattgcggccacaattttggctggcattattttgaccaatcaagacgcctttgcggccactgattcgccaataacaaccactaccaccgcgccgactgttcagcaaacagcgccgactaacccgctatccggcagtcaagttaccttaacatcgacaactggtagtagcgcaactggcagcactacaaccagtagccctgcagcaaccagtaccgcagcactgcccgcgaaatcaacggctgctagtggctcattgatgtcagcaatggccagctcttcagcgacaagtggtcacgccgccgaacctagttcaagtgtgaccgaggcagcaagcaccaataacctgaccccaacttcggcagccatggccagctctacgaccactaagtatccaacagacacaacagcaacgcctaatgctagttccagtccaactagtgctgaaagtagtacacctaacaaaactatgagtacaaatcagcaaactgacggttctggtgtaactcattcaacgacccctgctagctctgcaagtatacccataccaacttcagtcgccagtatgacaaccgccaagacggcaagtgccgctgcgccaggcgtcactaatagtacggcagctaacagcacggctcctactagtgtgacgacaactgatagtgctgccgagtcagtgccgctttcgacttccagtgagactagctcagaaaaatcagccgcagcaagcactacaagtacaagccagatatctgacggttcagaggttattcatccaatgacgagtgctatttcgagcagctcgtctgcgcccactagtggtgctaagatggcagctagtgcggcaagcgccgcctcggctagcgtgataaccagcgccgtcaatagtatcgctgccagcacgtattccgccgacgctagtgctgctagtgtcgaaagcgccgcaacacctgacacttcgcatgcgactgttcccgctagcaccgcgacttcggcagcgactacttttcaaattaccagtgttattaatagcttagcttccagtacctattccgaatatgccgaacaagctaacgcagaagctgcttcagcggcaacgacagctgaaaagcccgcgactagtgttggtacagtcgtgccgaccgcaacgacgacgccaattgaatctattgatacttggatgccgaacaagcaccttcaagaagccgttttacgcgagttacaagcgttgaagctccccgaccatcagtttaaatctgttaacgatattactaaagatgatatgcaattattaacccaattctatggagaaaacacttatattgatggtcacacaccatactccttggaagggctgcaatatgcgacgaacctgaaaaccatttggctcaataacggtctcaacgcacttggcggctattataacggcgacgtgactgatatttcaccattggctggtctgaccaaattaactgtgctgaatattcagcataaccgtgtcagtgatttatcgccgattgcgcatttgacaaacctacaagaattggacgtcgcttacaaccatattgctgatttgtcagtcttcaaagacttaccgaacctcaagacaactacttatcttgggcagacaattctagaaccactcgtttatgtcgatcaagacacgaccagtgcaaccttaaagaaccgcttctatttaccaaacgggcagcaagctgtccttaaatcgcaagccgccattttgaaaccagttcaactaactcctaacggccaattctactaccggttctacttcaacggcgcgggaaaagccgtgaatggtgacctgagtaacgtggtacccgacggtcaaggtgggttgacattcaatcagttagtaccacagattccaggcttcactggtgatgccaacggtcagttcgtcactaacggcgtcagcatcaacgttgtcccaaatgataaaaacttttatttggttgctcaaggctcagatggcagttcaccggtgttccatgtctttcagccctatgtattagcagccaaagcggccccagtaaccattcaccatatcgatcgtaacggtgccgctctgcgcgattcggaagaattgaccggcctcgttggtgaagattatcaaagccccccggctgatattacgaactacacccacgtcgagacccaaggcgccccacaaggtactttcagtgcggaaccgcaagcggtcacttacgtttatgataaaacagctggagcccctgtgacggtcagctatcaggatgaacaaggaaagaccctgcagccagacacgacttgcaacggtttggctggtgatccatacacgaccaagccgctcgaaatcgcgggctacgatctcacaaaaacacctgacaacgcggccggcacgtttacagctgaaccgcagcacgttatctacatttatacaaaacaagtcccacagccggtgactgccagctatcaagacgaagatggcaaagccttacaacctgatatcacccacactggtgaaattggcgcagcgtatgagactaaggcgctagagattccagactacgacttagttaagactatcggcaacgcaactggtacctttaccaaggaaccgcaacaagtcacctacatctataccaagcagattccacagccggtgactgccagttatcaagacgaagatggtaaaaccttacaacctgatatcacccacactggtgaaatcggcgcagcgtatgagactaaagcgctagagattccaggctatcaactcatcaagacaccaactaacgcgaccggtagctttaccaaggaaccgcagcatgtcctttacgtctatgaaaaacaagcagtactgcccgtcaccgttagttatcaagatacggatggaaagccacttcacgcggatattgttttaagtggtgactttggtcaaaattatcaaactgaacagttgtcaattccaggctacgtcttcaacaaagttgtcggtccaacgatcgggacctttggcaccaccgcccagcacgtcgtttacacttacacgccggagccgagtgggcctgaacaaccgacgccgggtcaggaaccagaacctgtgcccgaaccacagccgacaccagcacctcagcctgaaccaacgccgcaaccgagccctacacctcaaccgagcccggcaccacaaccaaacacggcaccacagccagggagttcatcgctggcaaaagcacccgtgtcacaaggcactacgacttcacaatcgtcgccaacgactagtccacagccaacaccgattgcaccagtcagtgccctggctcaaccaggaaaacagcaagcaccagcaacagttgctacgcacaattcgggtcaattaccgcaaaccagtgaacaatctgaacacggcgcaacactgggtggtatcttggccgctttatttactggattaggttggctaggactggcagctaagttcaagaaacgggaataagtctaattcgacactgattaagatacccaaacggccacccatacggtggtcgtttttgttagcactaattaccaccatataacgcccccatcttttcaaaacgacttaattctacgggctataaataacttaatttgccagtgtataacgtttcagattaagctaccactaagttataataaccatatcgaaaggagatcaatctaatgaaatatacgaaaaccaaagcagtattaaatcaactcgttgccgatttgagccagatgtcaatgattatccatcagacgcattggtacatgcgtggacccaactttttaaagttgcaccccttgatggatgagttcatggaagaaattgacagccaactcgatgtcatttctgaacggctgattgcgcttgatggcagtccttactcgaccttaaaagaaatggccgaaaacactaagattcaagactggcctggtgaatgggacaaaacaaccccagaacgcctcgcacacttagttgatggctatcgttacttggaagacctttaccaacacggcattgaagtatccgatgttgaaaaagacttcagtacccaagatattttcattggtctcaaaaccgcaattgaaaagaaaatctggatgattcaggcagagcttgggtcggcgccggaaattgatgaataaaataatattaaaaaaatcggtaggcttataagcttaccgatttattttatccaagtaattagttactaacttcaataatagggccatcaccccaacacctaacgaatcttcttaaccataaataaccgtgctcgtcgataatcataatattgctttgaaaatgccaacatctttccggtagttaaatatgtttcatccttaactactagactgggtgccccatttgctagattcataaactccccggcaatttctggtagtggctcactcatcagtaattgatcaataaagccaatattgacgtctcgttgttgttcaaaataattgaacaatgaaccatacaatgcttcttcaggaatcgtatctacgattgcttttatatagtacgaatgttccatcaaatatggttgaccatccaattctcgaaaacgccgaatatcaattaattcctcattatctttaagatgacctgcttccggtaagaactcagcatcagcaacagtagtcatcgccatcactgccttcttagttgcaagtttcaatcctgcacgcgcagcagcttctgatagtccaccatcatgttgtaaagctattgaattattagtctgttgctgtcggacgaatgttccgataccatgcatttgataagtataacccatgttgctaagctgctttaacgcttggcgcaatgtataacgggttacttgatacctttccattaagactggttcggcaggtaatttacgttgtccatccgccaacttaccaacctgaatgtcagctaaaatccgttgaaccaactgacctatatccagatgtgccatttcaaatccccctctttcatgacccgaaaaacgcaccccaaatcttcggagcacgttcatatatgtttattatagcgtattaagagaggtcagcaccgtttgtagctatcactttcttgaaccagtcaaacgataacttcttttcacgtttcaaagttccaacacctgcatcatttttatccacataaatcagcccataccgcttatccatttgtccagtccctgcggaaaccaaatcaatgaagccccatggcgtataccccatcaattgaaccccatcaacatcgacagccaactccatctgttcaatatgttttctcaggtaatcaatgcggtagtcatcatgaattttaccgtccgcgtccttttcgtcaaaagcgcccagcccattttctacaataaacaatggtaaatcataacgatcactaaaccagttaagtgcgtatcgtaagccaaccggatcaatctcccaaccccaatccgaacgttccaaggccgggtttttcacttcaggattttgaccaggcgtcatataatcgtctggttcattatccgttgttttagtcacatgtgatgcatagtaggaaaagccaatataatcaaccgttccaacagccaaaatattcaagtcggcctcagttatgtctaaagcaaaatggtggcgttcaaagtaccgttttaaccaattaggatactttcctttacattgaatatctgccaaccaataaccagcttgcatggtacgttccgctttcatcacatcctgtggtgcgggagttgcgggataggttggccccatcgccatcatacatccaattttaaattctggattgatttcatggcccatcttaacaactaatgcgctagcgaccgtctcgtaatgtgcagcctgatacattaatttttcagcatcttcatcagcagtaatcttaataccagaattcgtaaatagtccccactcatttaaacccgtctgattattaatttcattaaaagtcatccaatatttgactttgttacggtatcgctcgagtacgacccgtgcaaatttaacaaaaaagcgaatcatctcacggttacgccagccaccatattcttttactaaatgatagggcatttcaaaatgggacaacgtaattacaggttcaataccatgtgctagcaagtcatcaaataaatcatcataaaactttaagcctgcttcattcggctcattttcatcaccgttcggaaaaatccgtgtccaagcaatgcttgtccgaaaacactttaagcccaaatctgcaaacaactgcacatcttcatgaaaatgatcataaaaatcaatcgcctcgtgatttggatagttttttccagggaccaatccatctgtaatctcacgtgcttgtgtattacttcccgcagtcatgacgtcagcaatgcttaaccccttgccgcctttgttccagccaccctcaaactgatgagcagcgaccgcaccaccccacaagaatccatttggtaatttactcatgataatttttcctctcttaaaagccaaattgcgaatcaaacttataacttgccataatcattaatcggcttgcaccgttccactttgttcttgtacaaaaagtttattgtcataaaacttaatgaatgggaaccaaataacaaaagcaatcaaagcacagacaactgctaaaacagctgcccgccaatcaccgccagaacctaagaacccagacaagcccaccggtgtcggccatgctacttgagcaattggtggattgaccatatggaacttgattgcaaaataagcaactgacattgatgacattggtgctaagaagaacggaattgcagtgtagggattataaacaacaggcatcccgaataaaataggttcattaatattgaaaaatgcaggtacaatactagctttaccaagtgcgcccaattgagctgatttggcaaagaaagcgataaacactaccattccaagcgtcgcaccggaaccaccgattgtcacaaaacagttgttaaactcgcccgcaaacggaatattagcacctttagcattgctaaccatattagataatacaattggcgttaaaaatgaggttacaatagtggccccatgaatgccaaccaaccagagtgcatgcataataaagtaaacaaccagtaaaccaatccaagtattagtcaaattcgtcacgaatccgaatggaattgcaacaattttataaatatcagttcccatcaaaattaataatccattaatcacaattactgtcaacgcaattagagctgttggaatcaatgcagtgaatgagcgagctacgcctgctggtaccgtttcaggcatcttgattgtccagttacgtttaacacaagttgcataaattttaaccgcaataatcgacataataatcgcagtaaaaataccagtcgttcctaaacgagtaacaccaccgcccatttcccagccatcaataattttagcgtttttattgaaaacattgataagcgtcatggcaccgtccttgaaaactaattctggtaaacacatgaaaaaggccatcattgaaatcaaagccccattcagtggattcacttcaatcttttcttcttgggcctggatttttgtatattcataaccaaaaactaaacagaaataaagtgataaaatccccatcgtagcggtatttgctaacatgtataacggtgtgattttgtcaaacgaaacagcaaagaatccggctagtgctggaaagctttgcggtaacacactaacaatcagaaacattgatccaacaattgtaaacggaattgttgccatcccggcagccataacagcccgtacaattctgaattgagccagctttcccattgggcccattaagtgattatttaaaaactgaaacattttattatttgtatcatccatcgaatttcacatcccaatcctttatatgcttgctgcaaactgacgaatatgcttaatatagcgatccttatcatgctcaatcaagaacacccgatactcaaggaaagcacttaccaaaataccaaagcctaaaacactaagtacccagggcaaactcgcttcatttaaaaatggatagaacacttttagttttccaaacactaaactcaatccaacactcagatttataaagagttgcacccagtaaaaccaccgtgtaaaagttagccgattcgtatgcttccaaaacttaccaatttgctctaccatcactacagctgttccaattaacaaaatgcttggcaataggccaatgccggaaccaaagccgaataaaacaatcgcccaataaagattaacaaagaaaaagatagcggttacataacggaatactagaaaacgattaaagtacatactagtcaggctcaatgcacgccgattagctgttgcctcattactgccgtttttaagtggcgacatagcatcacatcccttatcatttagtcattcgaatgagtgtcgttcgaatgactaaatgatagcaaagaagtcagtctttgtaaacgctttatttaagttgatttacaaattaatcacatttttccattcttttgtttcaaatatcatataatcatattcaaataatgacgtctgattagcatttagtcacttttttatcaggattcaataaaaagatccggttaatttaaaaaaattaaccggatctttcaactcattctattactcttagaaatcggattacgtacctccacttattagaatcagtgatatattcccagtgtaagtacaatcccacctacaattaaaaaggcaccaaataccaatgcactccataatgctaaaggcgcaaaaaccgacatttcagcgttcccatgcaactttagctgtcggaaatatcgccgcgatgctctaatctgaaaccagccaagtgcgattagtagtatcccaaaaactgtttgaatgatattactcatatcctcacctcattcgattaaataacatcttgcttaccgatcataagataattcaactgttaatttaaagcagtcttcactaaatttatattcagttccctcgataacactattatacgctctatccgacattcaggaagcgctttctattagtaaatatactaaagagacctacagttcaatttcaatctcggcttattaaacagagactaacttaagtcttcttttttcgcaaaaacctctttaaccaccgtcaacgcattcaataccttcggaaaaccaacgtaaggaatacaatgaatgcaagtttccacaatttcagtacgactaagcccaacgttgaggcatccgttgagatgaacacgtaactggtctgctgtatcaccttgcgttaataaactagtaatagtaacaagttcgcgttgttgcaacgataaaccaggacgtgtataaatatcattaaatgcaaattcaagaattagcttagccacatccggtgccaccctatccaaactagccattacatgatcagctgcttcagcatccacccgttgtaacatggcttttccattaattaaccgttgcttattttccattttaatcagctccttcatttgattgattctaggttacaacctcgggtgtacccgacatcaagctttatttcaggaggttttcaaattaatgcaaattggtgaattttcacgacaaactgacctaacaatcgatacgttacgctattatgaagaagtcggcctgcttcgtcccacgcgaactgccggtaatcatcgtcaataccagtctaaagatatcgactgggttaattttttgaagcgtttaaaacaaacgggcatgtcgattcgaaacatgcaacgctacgcgcaattgcgctatatcggtaatcaaacaatccctgaacgtttgatattactgcaaaaacaagaagcacaacttaatgacctaatggtagcaacacaagctaacttggattttcttcatcagaagatgacaacttatcatgaaatgcaagaatcagactttgaatcccattaaattattaatattatatttaattacttgtttttcatttagcattgcataaactgctatccaccgtttcttatatctcttatgattaatatcagatttcaattaatcatttggagggattattaatgaaaaaagcggggattttgggactaatcatcactattatcgtattagtaccagttggtctcggtttcaactggtaccactcaaattacggaacaaaaacatactatactcaaatcacgactaaaggtgaacgtaaaaccgggaaagatgattccggcaagccctatgtctactatcattactcacagcctggatacagcgacaatggtgttaagaaagagctcacttttgatagcgtcctaccacgctcactcaagatgcacgcttatctcaaagtcggttataatgacaaacgccaacaagtgattaactgggaaaaagtcgatcgaaaagacattccccaagcagcactgaatagaatcaattaattgttaaaccccagcaagttaaaagctcgctggggttttatcgtgttcagtctataactaatcatcgattactatgtcgacaaactactgcacctaattaatttgtataatgacaattgccgtaaatggtttcttccttccatgaccaatatctagtatttcaaaatccgaggatcaattctagctcacggctttttacttaagcttataattgccactttcaacaaagcaaataaataactatttaagtctattattgaacaaaatatgaatttagtattaatattttgttaatatttttaactagttatgatatgcttgttttcggctgccataatcattcgctcggccatataataaaattctacttatattcataacatttcgcctagtataagtactccaggaggaacatcgatgtcagaaacaaagtattgtattaactgtggaaaagtgattcctactaacgcgaccttttgccctttttgtggcgcaactcaggacaaagtcgcttccactgaagatcagaacaccattacttccgagcagcacaacacacctaatcaaccagaacatgtcaatatgtggaccgcactaaagctaggaatgcgtcaaacctttacttggtcacaacggattacgcggcctcaatattggtggctttacttagatttggtcctaatttccctagttttaaccatcgtacttggtatcagagcatacagttatccagcttttatcctcagcccattacacgttaatgttttacaaaccgtgctgttattgattttttcagcgctcatggtttggacttcagtgatgcaattcacagccagtgcgcggcgactccacgactctaatcggtcagcgcattatttatggttctatctgcttccacttgtcggccccattttaatcattgttttcctatgccaacgctctgaaccagctggaaaacgtttcgaccgtttagctagccaaccaaaaccttggacacacaaatggtggacttggtgcctactagtcttattgacattgggatacgccgctctcattaacataacggcccgtgatactgccatggacgccgctctgacgacaacttccaagtcagctacaactaactctgacgacagttacagcgatagcgacagtgaagaatctagtgatagcacggactctgactcagattcagaatcagattcagactctgacagtatcacgattggcgatgacgacatcgatatcgccgatcaaaaagcttacagtacctcatttaccgacagtagctgggcgaaatccacatttaaaatcgataaagtcacggtctacaaaacggacggcacttatactagcggtagcggtaatgacaagaaagattttaacggcgtcgtaaaagttcacatgagtatccatgctgggcaagatatttcagcctatccgacccaggccaaactcagcacgaacgacggtcaacaagtcgaagccgacatggatagcgatgattttgacggtgatttaaacagtggtaccgattctgacggtaacgtatactttgttttatcaaaattatccagcgttaaagacatcactagtattcgcctaaaatgggatgctagttatgatactgacgattatgacgacgataacgcttataagacatttgacacaacgcttaatttaaactagttatcaattaatactggtttataagctgtttaatccgtcaaatcggtgacggctcgtaattaaatcacgtccaaatatatacacacaataaattcccccatcagctagatttccatactagcctgatggggggatttattgcttttaaagtgtgctacactcctgtaattattctcaactaacattaattaactttttaagtattccgctttattccgtaagaagcacttcactgcttcatccaagtaaaacccatttctcattgccaaaatactcaaccaccacacggattcactaatatttttattacttttagctgttttattgattaaaagccgtcgacttctgtgtatttactggctgtaattaagcgataattaccagcattgactgttagttctacccgcgctttacgacttcggatataataatttttcccacaccttttgatttcatctggttgtatcagaatatgattgactaaatctttaatttcaacttcgcttaaattaacggctaatttcttattaatacgttgaaagacccgtggtgtatagcaaatatgtgttctaattaactcaagaattacggattgtttgctcatttactgccctccaacatttaatcatgcacttgctttttagaacgtacgttcctataattgaggataacatattcggttctgaaaatatattttcctctggaggtcaacatgaaaactgcattatttctaatgctagatcaatacgcagattgggaagcttcttatctagctagtcaattaaatcaaagcactgactggcaagttaaaacgacttcaacaacaccattggttacgacaattggtggcttcaccactaaagttgactatcaactggattgtttaccaactattgacttattaatcctaattggtggtaactcttggaatatcaataattcattattatattcactagggtccgtcttaaaactacttaagtaagatgcaaattgaggcaatgtagaccgtagccagataaacatgagcgagcttatcataacgcgttgcaatcctacgaaagttcttcaactgattgaagaagttctcaatcaaatggcgctcacaataaacgtggtaatcacaggtccacttgtctttggtattttcctttggcggaatggtatagacgcctgctttatcttcaatatactggcgaagtttcgcggtgccataggctttatccgcgataatatttgattgagaaatatcgaagccttccagcaactcactggcaacttggctatcatgtacttgaccacctgttaggcgaaaacccaagggattccctaatccgtcaacgagtgcgtgaatcttggtcgttcggccacctcgacttaatccaatagcttgattttcgaccatacattcggcattttttttgccccagtggccttttgatgcgctcgaacgatcgttgaatctaagctcaagttttccatgtcgggatcgtcaatcaattcgagaaaaacctgttcgaacaagcctgaacttacccaggctcggaagcgactatacaccgttttccaagagccatagcgttcaggtagatcacgccaaggagccccgctgcgcatgagccagaggatagcgttgagggcggtacggttgtctaggcttgatggacggccagtccggtatggcgggaagtatcctttgattcggtcccactgagcatcttccagttcgtatcgtttaggtgttgtcatcggaatgcctcgattcgtttttcctcagattatacctgaatttttagttttcagacagtccctagttcagcaacacctcaatgcctcaaaaccagttggcgcaatctgtggtgcggtagattacttagcccaaaacggttttttaactggttatcagcataccggcaattcactggcgatgtggcacaattatcctaactatcaaaactcagccgactttcatgaacagcaagtcattagcgacaagaatctagtcacagctaacggcacagcggcactggcatttactgccgccgttttacaactaattcattttcaatctagtgaagaactaacccgaactatcgatctataccgcttaggattttaccaatactgtcaaaaatatggtaatccgttcggctaagtttttccaaaaactaatcttgtcagttaaaacaacgtcaacactcgcgccaaattctgccgcataatgcagacaccttcttggatagataaatcatgcgtattaaataaagcaatattcccaataaaagtttcaaagaagagttgttcattagctttcagaatttaaaagcaatattatcattttagttatgcggttcaaggccaagtgacatcgccattcgacccaactctgggctcgatagtcacttagttctacctaaaaacgagatccaagcacgtatgaagacgtcgctggatctcgttttttaatttttatgacgacaattagtgccgtgaataaaccggagcatgctcgttcttaaccgatttcacttaattaagcttggtaatcctgatagtctaccgcaaagttctccaaagccttcaaaacaggcaagaacttctctcctaatggggtgagtgaatattcaacctttggtgacaccggtggataaaccttgcgattgagttcaccaaaacgcaagacccgctgactaaggaaatacagaataaccatgctccattttccgcgaacgactttttgaacactggcaaatggacaatccaaaaagttttcatccgatgccgattcattcataatatttaccacctaatgttcatgattaatcaatcgtacaacgttaactaataatcactattatactaaagattatccggccagcgtcgttcataatatcgtatttgattagacagttattttatttctttactaatattagtttaggacagattagcgcgcggctgcacgctgattcttgtcattgcccacttccagtatcttaataactgctcgggtaggcgcgtccactcacgataaaaccagctaaccattggtcgtttcctggtcaaagacaattacccgtttaccttgattaccaacctgttcaaaatcaagatggacctgttgagcgtaaatgggtaggtctgctttatacgactactacgccaaggttgccatatagctgttgaaaacaaatcagcaaattattgtctacccatttcagccctctccaagtgaacaaaaacttctttccatgcaaccatcgtcaacgttacccatgtcagcattgaaacacccatcggtagccaaaaggccgacattaaactgatttgtatcctaacttgcgtatgccatgcaagcatcagcaatgcaccatacaacgtaagattcgtaatcatcgccgctattaacagcggtacaacttgaaaacagcactccaagctacgttcctgcaacagcatcctagcactgaatcctaattgctctaattgttggaagttttgctcttgttggcgtccgcttaacatcgcaacagaaattatattagcaataactagtagtcccggtgcccctacataaacaataaacgaaacaatgacattcttaatatcttgaccaccagtcccaccaagtccgtaaagtaacactattaacccataactgagggattgcaatgctagtattggcacattaacattggcattaatcatcacttggcaacttgctaatttgaatagtccagatggtgttaacttcgttatccgtccagaaagccacatcagtaattgtctgccaatttgagtctggactagaattaaccaaaataatagtacaaggaaaacacctccactatcttcttgtgtattggtcactaacacttggtaattcgctatgctcaatcccactagcgatatagcgaataagagcatgttgaaaattcgtctatggtgttgtcgcaataatcgatgtgtgttaattagaccagataaaactgcaacccccgctacaattaaactagtcatcaggccaaccttgacagatggtctaaagaccacgttcggcaaccatgtgcggccaatgtaaaattgcaataatccgtatagcggctttatacttagcattgataaactataaccaacccaactacttaggaaagctgtcaaccccatctgcacagcgattaaaagtgccaattgatgctgattagcacctaaaaccacccataactggtattcattagccaactcctgcataatcagtcgaataacttcacctaaaacaaataatagtgttattccaccaaaaaccattggcatgataaacaatggtaatggatcaatgtgtgaagaaaacgttacacagctcaacgtatcgataccagttaagcaaaagccaataagccagccagaaataataaaaataaaatttcccatcatccaagacttccaagaatattgaaattgatgaatacttaatgacaccatagtcattacccccgtatactatccatttgagtaaagagttgatcaactgacgggcgttcgacctcagaaacaatgtgaccatcgcttaggattaatgcacgatcagtacgggctgcctgttcaatatcatgagttaccatgatgatgcagacaccattattagccaactctcgtaattgttgaaatattacctccctggacattgagtctagagcacctgttggttcatctgcaaagataattttggcatgcataactagggttctagcaatcgcaaccttttgctgttctccacctgataattggctaggaaactgacttaaactagccttaaaatttaaatcacctaataacgtctcaacgttaactttgcttattcgttgatggttcaaacgtaagggtagtatcacgttgtctaaaacatttaacgctggcaataaattatacgattgaaaaatcgtactaatcgttgtgcgccgtaattgcgccaatttttgtgcagataagctttggatacactgtccatcaatgtaaacctcaccagaggttggttttactaatcctgatagacagttcaataaagtcgtttttcctgagccagaaggaccaataacacttaaaaactcgccagttttagcgtgaatcgttgtttcatgcaatatctcaacatcatgatccgcaagttgaatttgcttgctaatcttatttgcgataatcatcattagcctcccttggtattacctcatacacaattgaatttacattataccgataataggcttttaaaatgcaaccgatataacatgtaattttccaagcaattggaataacaaccaacgacatgagcaacataccacaactaatcatcaaacgaccaatgtcaaaaatatgagcagcagtgatgaactgccaaataatcacaactggtgcagccaaaccggcacctagcataccccacactgttaataaaactgttaataatacaatcgcaattagccaaaataagataaagttaacaaaaacactaccaacaaatgcaaaaaaattaaatcgacgcataataatttgatcttcaccaaaaaaataagctgttggtacatcaaatagttcactcaaatcctgaacagcttttactggtaatgtatgctttccattttcccacctagcaacagtctgctgtgtaacaaataatttttccgcaacttgattttgcgttaacttcaattctaatcgctttgctttaatacgttgtccaattgaatctcccatttattcttccccctccgactacacttatttacccattttaggagctaaatagctaacaatttatttgataggtgctcaaaatcattgatatatcagaatttcaaatcaatatagacgcaacaattctaattgagccagtgcctaaactaaagaatttcattgaatcagattacaaaaagttattactaaccacgtaatccccatctattaatctcacatcatatctaataaatctgttgataacttctacatcataaaagttatgcactgtggatggctggattcaccacaattatcctcattttccttacttatccccagatgctcatgcacttacccacaaataagtcatgttattaacatttacagtcattagtcccaactaattaccgatttgtcatctaattcctttaacttatccacaagcacgcgtgcaacaactgcaaccattcgcaaataatttaacttaccattctagtctgcacattgaccagcaatacctaaaccgcaatttcgcggtctcagcgctagcatcagccaacgtcgcagccgcaatttatttcgtccaattcatcaccagctactaatgagggccaccctaaacaggccatcagcattatctttgatttagtctgacctcaatttcatgcgctttgaagactcgggttgacctgttatatgatgacacttttaattaatttacgattaacagattattaaaatttaattgacattcaaagtccttattattatcatattataatatacaaggctgtcacttaagtctatttcaaataacgtggtgaatgtaatggtaaaacgatacaatagcaaaaaaattgaacacctgatttacaatatttacaaaggttacggctttaccgaagaagaaagccaagaagtcgcccacatgttgatctacaccgatttgattggcattgaatcccatggcgtccagcgaatgatcatgtatgacgacttcattcgtaacggtaagattcgcgtacataatcggccagaagttgttaaagaaaccgatgttagtgcggtcgttgacgcgcactttggtttgggccaattgaacggtatctatagcatgcgcctagccattgaaaaagcaaaacaacacggtatcggtatcgttacgactcgtaactccggtcattatggtattgcgggttactatgccaacatggctgccgaagaaggtctgattggcctgtcgtcgtgcaattcacgttcagcgatgttacccactcatgctaccaaagcgttggtcggcaccaacccaattgcctttgccatgccagccaacccgaacacatttatcttcgacgcggccacaacgacggtgccacaaggtaaaattgaagtttatcgtaaattaggtaaagatttgcccgcattatgggtcgctaaggatggcgaaacgcccgttaatagccataacgataccaaagacttggatgccctccgtgatttagattccaatgttggtttagcgccattaggtggcgttaccgaagacaccggtagccacaaagggttcggtctcggtgtcatcgtcgaggttttcacagcaatcctttcaatgggcaacacctccaacgaaattactccggacgacctttccgtgggcccttgtcagagctttgtcgccatcgacccttcaatctttggtgataaggatgccattattgctaagttttcagcttacttgcaagccattcgcgacctaccatccgttcccggcaaaccagtcatcgttgccggcgataaggaagctgccgcgtatcaagaccggtcagctaacggcatcgagattgatgacaagacactcgcagaagttaccggaattgccaagcgactagggatcgactacgcgcaatatgttgattaactaattttgttattcatctaatttaaaaaccagcaaataccgatgtcctgaataatcagggacattggtatttgctggtttatttgtgtttggcttataacgtaaacattcgccaatcagcaagtccgcgttgagcaacctctaataaccgttgtttttatcgccatcgccacaaaacattggtactttcagtagtcacgcgttaaaggtgcaagcaatggtcgttagtcttattatacctacacggctaccactttactgccaacaatcacatcactaccacttagcgcccaccctaaaagactgcgaccctaaattaatttggaaactttcctgaccatgatttttccacaccgtatcagtctcaaaaaatccacagttacccaagcaagtcagtttacacccgctataatcatcaagacgaaccttacttacaactatccatttaatttgacgtttccatccgaataaccaggtgctaggattcaactcgtggaaataatcacgtggctgttgtaattttttcatttatcgcacagaaattggaggaatattctatgaaaaatggagtacgtataacaagaacactagtcataagattgtcgaactcagttctattgtcgtaatgagcagtgttttaggaattacattagcaaagcctgtacaagggaaagctgatcaaacatcaagtcctagtaccactaaagttaaagccgcaacttcaggtgctacctcagaagtatcatcaattagtacaattacggctaacagtgctactaacgtgtcttcagcaacccatcaattttcaacagcaactactactagccagcaggccagttcagccactagtaatatttccacaactacagcaagcaaacaaatatctaaatccactactggtaagctaaattcaaatgagacagcagctacaagtaatagcgcggctacctccgtagcagtacggcaccatatatagcagcaccagctattcctagtcatagcacgtaatttattgatgattcagcccctatcacatccccgacacccgttacaactaattctatccatgttcgaccatttacagtacatagttcattttcgtttaaaccaggtcaatttttacgcttcacacttcctaatgttgctttacttcgcgatgacgctgaacaaggtgttccaaattacgtaaaaaactttttcattgcaattaaacctggtgcaatgattgggtggtcacaatatcatattctaccatccatttctggagcacaagcattcggactgtaccttcactatcggcacccgttgtcggtacttactatcctggtgattcagttacttacacaggtcaagttaacgctgagggatatatttgccggctctggcaatacgcgttacgttgcaatgagtggcacctcagcacaatacaataccaacaatatttcgggtacttttacctttactcaacaaaccaacattcgaactgcaccatcaacgtcaatagttggggtctactaccccggtgactctgttatttataacgcccagattactgctgacggttacacttggttacaatacatttctggctctggcaccctccgctatgcagtaatgtaaaattgaggagtatgattacatgaaactaacaacgaagtttattctatatctaaccttatttttttccggaatagtgctactatttgggattagaagtatggttagaaatagtttcgctttcgaagcaactagggctcaagctgccagtacaagtcactctaattcaagccatgctaaatctaaaacgcgtaaaagtagtgtcagccataaaacagcccctgcaacggcaaccccggttgattggcacggcccttctgaatccaaccatccttatccgaatgtgcaaaattatcccaacttgaggattgatgtctccgttgcaaaacagcgggtctacctgaaagctggcgataagctcctgtacacaatgcttgccactaccggtaaacccggcacaaatgcaacccccaaaggcgatttcgttatccaacctgaacgcggcctgcatttttacaatgctagcttgcacgaaggtgccaattactgggtctcatttaaggatcacggcgtctacctctttcactcggttccagtagacgcatccaatcactatattgccagcaaggcagccttactcggcaaaaggtccgattcacatggttgcgtccgcttgtccatttcggatgctaagtggatgtacaagcatatcccagtaaacacacctgttcatatccagtaataatacgaagcctgccaaacgcgtaacgattagctgaaaagttgatagttacgcgttttacagtaaaaagcacaatgactagaatcagtaatcgtgctcactatcaatcattaatttgaacttatcacgtgctcctcagccaatacagatttaaacgctacttcaccagtcaacaagttggtcttaagcagtttttgatttcttacgtatcaccgccaattaatagtcaaacttaaagccacccaattgcgctaccgtttcaggatcatgcatgttgccaaataggctcgtgccctcgtctaattttgtcatttgttgcatctcgtcttgagttaactcaaaatcaaatatttgagaattctcaacaatgcgggctgcatgcacggatttaggaatcaccacaatattacgctggttcaaccatttcaaaataatctgaccgttcgtcttaccatgtgcttcagcaatttcttgaatggctgagtttgtgaaaattcccttcttgccttctgcaaatgggccccaggcttccggtacgatatcatgattcaacaaccactgaacccgttgtggttgttgataaaatgggtgaagttcaatctgatcgactgtgggtttgacttcattatgcataatcaaatcttgtaaccggtcattttcaaagttggccactcccagtgcctttaattgaccatcgtggtaagcagcttccattgctcgccatgaaccataaacatcgcctaacggttggtggatcaagtataaatcaatataatcaagtccaagacgtttaagtgaggcctggatagcggcttgtgtttgctcataacccgcatcttggacccataacttagtcgttacaaaaatttcttcacgggcgatgccactctcacgaatggcggcgccgaccgctcgttcattgccatacgcagctgccgtatcgatcaaccggtaaccttgttttaaagcagtcaagactgcttgcttacattcttcaaaatcggggatttggaaaactccgaatcctaatactggcattttcaaaccattatttaatgtgatttcttttttcatattagctgctcctattctggggtattgattccaacgctagctcggttgtcgagcgctggttccgtaattagtttcatgacgtaatcggcaatgctatcgcgtgaaacgtcatgaccaccgaatgattcgcccttttgcgtaatttcataattgattggcccgttattgtaccaaccaggacgaataattgtgtagtttaaatctgattgttcaatacggtcagctgcctgccgaaacgattttaaaatcggattgtggtaaggttccggcgaatcacctaaccacgctggaatttcctgataaattcccatcgttgtaataaaaattaatcgttgaatgccattgcgttccatcgctgagataatatgagctgcaaagctatccatatcaccacttaatgcgacaaaaacaaagtcctgtcctttaatcgcttgatctagttgatcatcatcagtgacactccctgccactgccgtttcacgatcaactatcaactttaaccggtctgcacggcgcgaatataaagtcaactgtacgtccgtttttgctaacaatattttacgtacggcactaccaattgatccggttgcaccaataattaaaccttttttcatttatttcacgtcctccgtatgccaaatgaagttagaattccgttctgcaatataccactgaccatcgactttttcgtacttatcctgataacggaccccttcattagtcgtcaccgtttggccttgctcattggttttaaccagcgtaacgtaattataagcaatgccatccgcgtgggttgcgtccgtgaaactaacggtttgttgtccactcatatgaaagacagctgagtaatcgtccattgaagaactgaaagcgttcagaatttcctgacgcccattcagcgtaaacgtaactttaccatcattaataatatttactttaccgtttggtaaaaagagttgaacctgcttctcattttctttagtgtctgagtaatttgaaaataaatcaacaacctgctttaaagctaaccgatctgaaacttcttgaatatccatcatatttgggacttcctttcttgattacaccttgattatcgcgtgaattggcttatataaaaatggtcaatgttttaaaaattgagacatatgccacgcttaactcataaccgacgcttaaaatattttaccgtggttgcttggcaggttctttgcgagtcagattaattacaaacgcaatgaccaccaaaatcaaaccaatcaccataattaaatgcataccattaaataaaatggtgcggagctgtggtaacaagttctgtggtaacgagcgtgccgaacttgcatccgttaacttattgatcatctgcgtcgtaattttcccaccaatctggctagcagtactaatgctcaaaatcgcaccaaaaattgaagacataaacgtttgaccaagtgttctgaataacaacccgaaagttgttgaaacactaattagatctcgtcgaacgccatcctgtagtgaaacttgcattggtgtaaacgataagcccattcccaaaccattaaagccaccactaactaataaccaccaataaggcgcaaattgggtcgccatcaccatcgataatgctgatagtaaaacactaaggattccaaacataacgattcgtttatacggcatttttaccatcaaatgagcagtataccttgtccccaccaataataggatcgaaccagcaatctgggtcaaaccacctaacgtggcactagtacctaacagtccctgtgaccacattggtgcgtagacactataaccgatgaagaaaccgttaatcagaaacatgatgacattttgcgattggatacgccaatttttcagtaattcagtgggtaccaatgcatttttttgccgtttttcaacttggtaaaaaataaccattaagatcaaaccaattaccagtaaaaccaacgcttgagttaaatttgaagcgattgcgtcactagcaaacagtaaaacaatcagggttacaatcaacagtcctgatcctaaataatcaaatcgtttttgagtagcttcatgctcactctcacggtaagagaattgcaataacaggagtgagataattccaatgggtaagttaataaagaatacccaatgccaagacaatgtgtctacgagccagccaccaatcaagggaccgacaacggtggataacgtataaaacgccgtgacccatcccaaggctcgtgctcgttcagcaggattttcatataagtccgcataaatgataaatgggatggaaaccattccaccagcgccaattcccataaaggctcgggcaataattaacatgaccatattagtagacaaaccaccaactaccgaactaatgataaatagcacaaccgaaatttggaaggtgagcttattaccaatcaattcacccactcggccccataaaaccgtcgtaactgctgtccctaataaaaagattgagctgatccagccaatcaggcgaatcccatttaaatcactggtaattgccggtaatgcagtattaacaatggtagcatctaagccacccataaaattcgcaattaacaacgcaatcgttgcgattgccattcttctttttgtcatcatttctccttctaatacatcgacgcgtgtgaggcaataatttgccagccgtgtggtcccttaactaactcgaccttggattgcaaaggccacgtattccggaatccatagatgcgtgcatccaactcgttacgcatgactacttgcgcctgcttcccttttacaaccacttgaaacaaaacctcatgactactaaagtagtgcatgcgtccaagtctaatctgttgtagccattcagccttgctttgaacagttcctgtgatgtgcactaacttagcatttggtgcgattacctgatcaagcaattcaagatttttttctaacattccctgaacttgttggtgaacaacacgagcaactgcccgttcttcattaattttaactgtcatttaatagcctccgttatttcgttgctgatggattcattatgcgatggattccgtcactaaaaaatgggcagtatttttaaaagcgggacttatgccacactttttctgaatttggcgcataaaatatatcaatttgattattttttcgtccattaaaacgtgaatcaagtaataaacatccttagagtacacattaatcgctagtaggcttccaaaatcgtcaaaattctttcaatatacaaaataagggccgagactgtatttttaacaatctcgacccttatactcatactcaaactgaaaattgactcactgctctaattttaaatactgttctacaccgccttgcattaattcggtagcagcgctaataactgcttcaaggggttctttcttaccagttgcaacccaagttgtataaaccttcagtcccgtctgctccacaaaatctagtaaaattctttgtttccaatccgcaagctgattaaactcctgggactggccccaagttttagtcatgacttcgttgatcatttgttgccgaatgccaacgtaagaccccactgagcacgtcgtaattcgatcatatgcctcaccctgagtagcggaataggtgaaaaaagcttccacactttttgctagatctcgtggatattgtaaattaccaatctcttttagataggcttgagagtatcgcgtctgtaattcaatcagtaaatcatctaaagtcggataataccgataaaatgtttttttgttgatctgggccatcttagccaattcggtcactgtaatttttgaatattctttttcgcaaattaaccgtttaaaagcatcgtaaatactattgattgttcgctgaacacgtaaatcttgatattgactcacttgcatgccatcaacctccaagttaacctgataagtcaattatactcacaaataagatcaagtgtgctagtttcttatctggtatttcaagagcctttattaagaaattgtagttttccgcagatattgagcttaaattcttgttaaaaatctcgattcaattagtcggctgaataccgctctaacttcgttttttcagtaaccttatataaaaaacacaactgaagtgaaccccataaattggagtgaatttctaagctgctaattgtgaaccgtgccaactttaagaatgtgaaagatactttcagctaccacattatctaggcatgtggccttgcagctcatgctttggaaaacgcgagcttgtcgcaaaatattcacgtaccgacagttctgatactgaaacccctgatcctaatgaattgcatacggtatggtaagcccgaacgtcgtgccactaatcgttcaagggggcgtgtgatgaaggctaccgttggtctacgaccaatggcccattcaagaatttctccgttataaaggtcaatataagctgtaaagtatgcacgttcgttgattgtttgattcccctaacggaattccgttacatcagtaacgattttttgaaatggacaatccgttttaaaacgacggtttaaacggttatggtcaactgtaccaacagttcctttataagagttatatttcttcgttcgacgattgaatgcctgacaaaggagattattttcacgcataatacaaagtactgccttgtgattaacgttgatgatcctgattgatatttacggtgaagtgcatcgtagtaactactattcggcatgtatactgcttttaaaaccacaactaatttaacattgaattcacgccttagctcagtgattagctggctttttcttggtttgagattttttctgtgccaaggcttcgagtttttccaagtatgctaaccggattcgtaaaagctcgttttcttcctgaagttgtttcaatgtcttagattgtttagatttatctgtcatttttaaagaccatcctttggatggcttaagacgtccctcaatcagtcttcgttcccagtcccaagccatcatcggttgcttcaatctgaaatgggttaccgttactggatatgaggcatgatgttcttgtcaccatttgataaccttgattttaaaggaatagtcataaaatgtcttcctacgacaattctctaatccttgaatgccaaaaatttcaaattgagtgagccactgataaatcgtcgcacttcctttgataccatattctttcataagtaacagggacgaatttccctggagatatttacttaaaacttgttgctttattttagctgaaaacataatacccccctgagtctggatttacttcaactcaagggggtactttatataatagaaattatgatacaaatcatccagaagtgctgataaatagtaagcatagaagaacattaaaaaatggcgacttaacttcaaagaaaatttattttgctgtttgaaatctttaacaactaactgtcactgtgaagattcgttaaccatctctttaaacattaatgattggactaatatctccatcagcattagtgtatggtaaaacattttggaggcaataaaaatgaaatttaaatttcaaaaaaatttttatcgtagctttagattctggatttctttacttctctttattcctgtcctgatgcattacagtcatggatttgaatccactaccgatatattttgggccatctttattcttggtacctgcctttacggcatgttatcagaactattcttacagaaaaagaatagctgacattaggtacaatcagatagttgagttaaaaaaatccaaagatgaaaatctctggctggcactaaagtgaaccccgcaccaagcttcatatttcaagcttatctaaccttatctcagcttatctcagcttatctttttcgcttgttttgtccagctcagtaattctgttaattacactgtgcaacccgcaccaagctcatatttcaagcttgtctgaacttatcttttttacttattttatggttaaatacagcttcataaaacatagctatacgataacgtagtgcacatccatttcaacctaattattatacgtaagtataccagtttttaaattaacattcataaaactcgatacacaaaaaagaggctacgacagatatagcctctttcatcatgaaaattaacgattacgcttttatactaattatccggtatctatttacttaccacatggtcctcatccaacatgtactggaacgccacgtcaccagtcaataagttagctttgaacaagccctggttaccattgttttcgtcacccatgaccacgaagtacgcggcaccttcatcagccacatgttgaaaactcaggtagttccccttgaaaccttgcttgcggaacaaaccaataatccggatcatttcacgttgtgtcacttcatctgctgctactttttcactcatatttagctttaactccaattctctgctttattctcattctgccgttttgggagctggtcttatttccagaaattactcttatcggccctcagcgcccaaaaaagcactcccctgagacagcggagtgctccaaaaaactagtaaataactattaaattatttgcctaacttttccttaccaagaacctttaacttttcatcaaagtcatagacaactggttcgccagtagccatttcaaggtccatgatatcatcatcactgatttgttcgatgtacttgcttaaggcacgtaatgagttaccgtgggcagcaatgattacattcttgccgtctaataacttaggtgcgatttggtcttcccagaaaggcataacgcgttccaaggtaaccttcaagttttcgccaccagggacgatgttagggtctaagtcagcgtaacgacgatcgttaacggctgaaccttcatcatcggcactcaataatggaggtaaaacatcataagaacgacgccagatatgaacttggtcgtcaccgtatttttcagcggtttccttcttgttcaatccttgtaatgcaccataatgacgttcgtttaaacgccaagtcttggtttctggaatccagagttggtcggattcttcaagcacatagtgcaaagtcttgatggcacgagtcaaaactgaagtaaaggcgtaatcgaattctaagcctgcttctttaactttttgaccagcagccttagcttcttcaacacccttttcgcttaaatcaacgtcaacccaaccagtaaattggttagataagttccattcactttgaccgtgacgaatcaatactaattttgccatagcagttaatgacctctttcttaagttatttactcaccctattttacactgaaaaagcgaaaaatcaaaacaatatcagcgcttattttcagaatccgggtggaaagtaatcgtttttttcagattaatgttaggtcgcggccggtgaaccggtttcacgccgatgatgtccaaaataaagttaaaaatcggtacaccgacgatcagtccccagacaccaaacagacgctcactcactagtaatacgacaaacgtataaaaaatgggcagctccgtgcgactcgacataaacttgggattcaagacataggcttctaaggcgtgcacaaccaaaatcattaagagcatatagaccacgtagcgcaaaccgccaaccgaataggcaatcaagctcagcggtacgactgaaataatcaccccagcgactggaatcagacttaaaataaagatcattaatcccaagctaatcagttgaggcatcttcaagattgccatgaaggctaccgtaatcaccgtattgacaatcgcaatcaagaactgcgcttccaaaacaacgccaaagctattcacaaactttttggcaaagaaatggacgtcttgaaagaaccagccaaacgtactggtcaaaaagcgcttcgtgaagacccgcatctgatgatcctcaatcgtaaagaagaagctcaaaataaatgacaagaagaaggttagtcccatattaccaatattagtaatatactggaacacaactgaaataccgcccttcaattgtttgagtatatccgactcttgaaaatacgatgtcacccacgtcaacacttggttagtatcatgtgatgggttctgataaaaccgatagactgattcaaacgtcaaaaaagtttgtttgatcaactgcggtaaataaatcgatacagcaaagtaaattccaagaatgactagtgcgtagaccactaggacaatgatcgtcggtggaatcttcacccaccgccgaactgcccgaactaaccgcgtcactaagaacgtaaaaataaacgttaataaaatgatactcatcatacttgatgccaagtatagcgttaacacaatcaacgccaatacgcaggcgcgccgccagcgcacatttcgtattaactgtgaccaaaattccacaacatccacccctctactatcccttactcctattctaacggaaagtctcagcaataaaaattaaaaggccgttgtgaatcgacaaaaaacgtgtcaagtttatcactaatcactcgataaacttcacacgttcgtttaaataaacacttaatgacttatgagaactgcatctttaagctctctaatcctaatgcttggtgaataataactgaggcgccacccaacaaggccgccgactgtacgttcttggttgcaatgatcggaacttgccgacttggcgaagttagcttggccgtgctctcccgaacattagtcaatagttgtggcaagatttctagaacggtcgtgttcaacacaaccacatctggcgcgaacgccgtggaaacattcgcaatcaccttagatagatagtaaacaaagtcttcgaagacctttgtcacttccggatcatggttgatgtagtcatgtttgaccgtcgtcaaatctagtcgatcgacatgcttgatggccttcaaccgagcccacaaggctttttcagaagcataatcgttaacggatgccaagtggtcctcaacgtgccgatcttctaacaaagcagtccccacttcacctgcttcgccttcatgaccagaatatagtcgcgaatcagccacgattcccgcatgaatttgatcgcgaacgactactgaaaccacgttatcgaaaatctcattgtcatggaaatcacgttcaaaaacggccgttaagttagctttcttttccagaactaccggaatccgtagcttatcacgtaaatactttgctagatcaaagtgtgttagtcccttgatcggtgtcttgaggattttattctcataaataatcccatccagcgcaatggcgacccccatcagaccatgaatcgtaccatagtcatcaacgttccgtaattgatcttcaatcaaatcaatgacatccgtcaacgtcatatcgctcgtcttaaagctttgaaagtgcaaaattttaccattcaaccgtgaatacataagtttgactgcgtcagccgtcatgtcaatgctggccacaaaaccatagttcacgttcagctcagccatcactggtttacgaccgccgtttttcgtgctgacaccacagccaatttccttgatgaactgggtccgcagtagctgattataaatatctgaaaccgtcactttattcaaactcaagttccgtgaaatctggctccggctaatcggtccttcgttaataacctgctgcagaacttgcttttcattcgtactgcgcattacatgtttattaataatcatactgaatttcgatgcccaccattgacaatcgaactactttaccaaatcatgttaatttggtctgccattaattcaatcatcaacgggcaccttaaccccctaatctgttaatattctatagcatcaaacaaaaatagtacacaaaatagtcaattttatacccattttgacatatgaacgttaaaaaaaggccaataccgatataaaatgaccgcccccgtagaaccaaaatatcaagaacgaaaactttccgtccttactcctacattctataacagtttttataaaaaaatcaccgattgacacctaaaagtaggtgttttatcgatgattgttaagtggacttccatactgttattaaattgtttatattactgcaacgacctcgctgcttgcgccagagacatatgttgtaaactggcttgttgtaaaatggcctcgatttgggcatccgtatactgactagcattaaatccagcttgcgctagctccgcacgcgttgcctgaatctgatcagagctataattcatcgtttgggcagcttgagccagtgagaggtgttgtgccgctgctcgttgcagaatagcacgaatttgggcatcactataactactgccgtcgagcccttgcgcagtcaactcagcacgagtcgtctgcacttgactgtcaccataactgttgttagctgcagctgacgagcccatcgaatggttagctgaggaagttgatgatgaagcagccgcctgctgtttagtggctggcgtgcgttgcgtttgttgctgacttccggtcatccccgtaaccgcttgtgccgcactcgggatcaccggtgctgaaccggtcaatgtcttgagtgacgcattattttgtttctgtaaatccaacacatttttccgaatatcctgatagtaacgttgcttaaacgccttatcctgcaataacttagcaattacaacgttagaatccgtaaactcattcgctttattcagctcagcagctttctgatactgttgttgataagtcttgcgtttttgttgcaccttttttattaaggtaagttgttcttgggcctgattaattaacgtaactgcaccgtgcttggtcgtcttaaccgtcataaagtcacgtttagccatgtcaaatttccgcgcagccaatgcttcttgaccagccacataagtctgggtctgggttaaataccgttgcgcctcagtactactagctttcgttctggtcgcatgtgtaaaactcgtctccgctaacgtataattccgcgcttgcagtgcccgctcaccagttcgcatttcagccgtgtatgagtcttcctgcagacggtaccgcgtatatgaataactaccaacccccacagcgataattactgcaaacacgatccacatccatcttttcatcacgacacccccatcaactgattttgtaattaatttattataacatgtttacgaatcaggtcgcgattcgttgtgcttacaaaactgttttcataagcgtataataattagtgtattttacgaagaaaggatccttattgcaatgctagaaaaaaccttttaccacacccttctaagccactcattcaatatgcccgtcacagtcaactactgggatggaagtagtgaaacttatggtgaaggcacaccagaagtcacggtgacttttaaagaagccattccaatgcgtgaaattaccaagaacgcttcaattgcccttggtgaagcttatatggatggcaagattgaaattgatggcagtattcaaaaattaattgaatcggcctatgaatcggcagaaagtttcttcaacaattctaagttcaagaagttcatgcctaaacaatctcactctgaaaagaagagtcaacaagacatccaaagccattacgatgtgggtaacgacttctacaagatgtggcttgatccaaccatgacctattcttgtgcttacttcaaacatgacactgatacattagaagaagcccagattcataaggttcatcacatcattcaaaagctcaacccacaacctggcaagaccttactagacattggttgcggttggggtacgttgatgttgactgccgctaaagaatacggcttaaaagtcgtcggggtcacgttatcacaagaacaatataacctagttgctcaacgcatcaaggatgaaggcctcagtgatgttgctgaagtccggttacaagattaccgtgaacttggcgacgaaactttcgactacattaccagtgttgggatgttcgaacacgtcggtaaggacaacttagcaatgtactttgaacgcgttaaccactatcttaaagctgacggtgttgccctattgcacggcatcacccggcaacaaggtggcgccactaacggttggttagataagtacattttcccaggtggctacgttcctgggatgaccgaaaacttacaacacattgttgacgccggcttacaagtcgctgacgttgaaaccctccgtcgccattaccaacggacgactgaaatctgggataaaaactttaacgctaagcgcgctgccatcgaagaaaagatgggcgtgcgcttcactcgcatgtgggatctctacctacaagcctgtgccgcttccttccagtctggtaacattgacgtcatgcagtacctcgtaactaaaggtgcttcatcacgaaccttaccaatgacccggaaatacatgtatgcggataaccgaatcaataaagcttaattaaatgccaaaataccaactatctcgattatttcgaaatagttggtatttttttgaccatttttcaggaatgactgacaactagctttcagtcaccgccatgcgtacccaacccaagatctgatggtagatgagtaacgatcctaggaagaaagcggccgctaaaccggcggatgtcggtagtttgttaaacatattggctggtaacactaaggctaatagtggaaaggcatacgctgctggcaattgtaagttaagcgcccgtaaccacaaatacacaagtggtaaggcaatgaccgtcgttaatagccacgaagcaatcaacaggtgaatgccgaccccaatactagcagcagccgacaatgcaagccactgcttaagtgcggtcgttatcgtatattcagactgttgagccgcttcaaagaaaacgacgatcacgggtgggattgcggccatctggggctgtcccgctagccaaacaatacccacccagacaaaaactaggctgataaagccgagcatttgccagcgactagcagaagcttcggttacccgtgagattgatcgcggtcgttgaatccaagccccaatcatcaggcaaatagtccagaaaaagatggctacgataaaggtccagtgcgttgcattaatgataattggcagtaagccagtagcaaaggctggcgccaaattcgattttaaccccttcaataataatagcatcagtaatagaccgacaagcactttgagggcgtacgaccaaggtagttgattgactaagaagccaataattgcagttccagatggtactaagaataactttaagggttgccgagtccacgccgtcttacgataaacccacgtcccggctgtcagagcaccgatttcgggtaaaatgatttccgcatcatgttgcaatgtggcactcgccaccattaatagaatgaagctccacccagctaagtatcgccaaccatcgctttgctttaaatccatttcgacaaaatattcctttcttatatttaattagatatatttatgttatcaagtgtcaacgactagcattgtaccataaatacaatcgtctcctcaaataatcctgaaaacacatcaacagttttcaggattattttcaatcactttcctgacctctaaatcaaaattcgactgagtaaagtcttacccagtcgaattcagtcgtcgcgccaacgcagtcgcaacgttatcaacaccgcagtcagaaaattatgcattttgcataagccttttgataactaaacggttatgctatttatcgtactagtaattggttaaccagcctacgtacactagccgttacggcctaacatcaaaaatatgaagatggcttctgctactcgtaaccaccaccgatatcggtgccagcgtaataccgaccaatggtgttttagccactgattggcatagtgcgcaatcagtggcgccccgataatcataaaaccctcggtccaaaaatcgacgcgggcgggccaagtcgtgttatcaaagccagcaccaatggtcgcaactacgagcaagatgtagaggccccacaaactgatttgtaaaggtcgtttgattttcggccaccattgccgggcctgtattcgcttaatcattgattgatggtgcggccgataatgctcatgaccaggtaacgctgctaacattgcagtcgcactttgatatcgttgctgtgggtctagggccgtggccttcataataatcggggcccatgttgaatcctgtgtcagtgtcgttgtatctaacggcccgctcggctcttgaccagtcaacaaacagtttagaacgacccctaacgaatatagatcgctccgttgatccgtttgggcgaagccatagttttcaggtgcggcaaaaccgctcgtgcctaataaacgagtatcactgtcttgctcagcatgatattgtcgcgctgcgttgacgtcaatcaaatagtagtgatcccgataacacatcacgttacttagtttaaggtcccgatgcacaatttgttgttgccccaacgcctgtagcgttatcaacaattcttgtgcgacgcgcaccgtcatttcgggggaaaacggtccttgtgttgccaatcgatccgctagtgtttgaccattaattaaggtctcaacacttacaatgcaatcagccgccgttaataatgcttcgatccggggcattcggggaattggctgctgcttcaaacgctgtagaacaggaatattatcaggatttactagtttagctaccgaaacaacctgttgcttcttaaccagtaacggaaactcgcgttgcgcaactaatggtcctagtggttcataaccagccgtacttaacaattgcattgcttgaacaatcggtaacaccgtgacacccccctttttatcaaaattactaacttttatcataaccatacttttggaggaattacaatgtcaaaatatcagaataacgaagtcacaccagtcgcacaccagtcgcgaacagccgaattagttttaggaattattggcggtatcttcggtatcattgccggcttactggcgatgaccatcggcggcatcggtagtgctttagaaaccagcggatcggctggggtcagcaatcttggcgttggctgcattattgtctctgtcctcgcgattattttaagtgtcatgattaatcgcaatcacgttttaatgggctggttgatcatcctttgtgggattcttaacttcgtctttgtcagcttcttcgggattctaagcggtctgctcattgttattgcgggcggcttagcactaagaaagtaggtaagctcatgcaaaaaacgaaagcttggtatcaaaaatggtgggcgtgggtcctgattctccttggcatcttctttgtcatcagcctcgtcaattctccacaagacggtaaaaactcacaagcagcgacgaccaaaaagaccagtgctagcaagtccaccgctaaggaaaccccggcaaatacgatttataaagtcgggcagacagccaccatcgatcacgtgcaagtaacggttaataatgttaaaaccgcaacgacgctcaatgatgttcagcctaaaactggcaatcaatattatacggtcaccgtaacattgaaaaatagcggtagagataaagtcagctataacccgtttgactttaaaatcaaggccgccggtaaccaaactagcctagatgagatcaacattgatgaaaataaccaattagatagtggtgacctgaccgctggtggctctgtcagtggtaccatgactggtcaagccaaagcagatgggtccgttgaactcatctacaatcccagctacttcagtgatcggcatttgacctttaaattacagtagtttctggtacactaatactaattaagaaggagtattaggggggcactaaccgtggtagaacgcgcaactaaggaactatttaacgaaatcaaacatgcaagtgaggccgaccaatttatgacaaatatggccactagttttattcgtaccaatccggcggaatacctcgccgagcttattcaaatcaaacacgtcactaaaagccaagtcattcggcgcgctaatctaacgccctcgattggttaccagtacttcgatggcaagcgccgacctaaccgggctcgcatcatcgccctcggattcggttttcaactgaccctgaccgagcttaacacgatgctcaagcgaactggttacgccgtcctttatgctaaggatgaatgggatgctctggtcatcttcgcacttagtcagcgctttgatcttaatcgtactgatgaactactttatcaatacggtctaggtacgattaccgacgaagattagcgtagttgccatatagactcacgccagctaaaagttcggcataaccaggttttagaataataaaagaccaggccctaatgagttgaatgctcattagggcctggtttgctcaatctaggtcaaagataaagatgatggtttcaatcaacacaatgaacgggatgtatcgaacaaataagataaagtaccagaaggcctcgttaaaactcacaacattgaatctagttatccctagaataatcaaacaactaactagtatcaaaatcgaaaatagcttttttacccttaatcgtttgccaaaccctgaccccataattacagccagcaacagcccacagcttacatacccagtgagctgattactatccagcttaaatccaacctgaacccccgtcgaaaagtaaagtgccgcaatgtatatcagcaagtaaatccctgcaataacttgaattcgtctgtagctattcatatgtctccccaatttagcagttcttagaataaaactatactaaaaggaaaccaataagccaatgcttttttcagctatgtagcacctgtaattaagcatcgttaaaataaaaaatcttcaacaataaatatttcaatcccggttgttcaactttagaaccgtgcgcaaggccgattaagaagctacagccaggcacgctcaacggcactatcttacgcatccacgtccgctcccaaaacagataagcactgttccagctgtagctggcaaattcttgattattaaattaataatattcaatttatacattgggattaactcgtttataaccgaagacagattgtcgaagtgctaccgctgctttctgagaatattttttaacacttggacgctttgcaccatcaaaaaaggccaaacgcattgcgcctgaccactaaaatcaactcgtagtgaaggtgataaatacctcgttctaaactggcacaatcaaataatacccgccactaagtccaatgaacaagtagatcaaatgccggactgtcgtcatgggtagccgcggcaggattcgtgccgccagcgccgtcccaatgaccgcacctaccataccaatcataatatgggagagcaagactggcgtcagaataccgttcagtacgcggactgtcgaaatatagaccacatcgatcaaaaagaaagtctgcaaatttcccaagtaatccgcagtcgtatcggcaagtgatagaaaataaagggccatcagcgggccgccaataccgaataacccattgaagaaccccgaaataatcatgaagagaccggctaaccaccacggataagtctgattcgccgcacgtttgctcagactaaagtacccggctaacgaaactaacagcgcacctaataaccgtcgcaataattgcacatctaaaacttgaccaagatgtaccgaataggccgccacactggcataaacgataaacggcacaataatctgacgaaagtggatatgctgatgataacgccaaactaatgttatgacactggctgccataataacgcccgccacggccgcactttgagcaatcggaaacaactgtggtaaaaagatcatcatgacgatggccgcaccaaagcccgttaacccttggaccagaccagccaataatccgggtaagaaaaccaataaccataccatcaacgtatcctcttttcatcataataaaaaagaaccgggtcacccagttccaacaaaatctaaatatgaattagtaacacaaaaatcatcactgagactagaccaatcaccactgataaagtcattgaacgcgtgcgataagccacaaatccaacgagaatagcagaaataatcatccccagattgccagaagtgatcactgcgtacttactatcgataaagacacttttaacaactaacgccgtgaatagtgagacgggtacgaaccgcatccattcattaaaccattctgggatcttccgcttcgtaaagaacagtagcgggaaaaagcgtggtatgaaagccacacacgcacaaaaaatgaccaaccaaaaatggtccatactactcattgagctgactgattgcataagaaaaacccctctgtgccctacttgtcagattcttccatggctgtttggccagtaggatcgtgaaccttatagagtaaatgactttctggcttatgtgccaacaagtaacgttcaataaagtaaccggtcaacgacgcgagtagtgttgacaccactaggcccagcgtactcttcattaagaccagaaaacctatcgttagaacgccagacaaaactgccactaagataatcaagcggctcttagtttgcataattgccatataaatgaatagtgccgtcagcgcaaaatccaccacttggagattaatcgtcaatgcactgccaatcaaactaccgataatattacttaccgtccaaaataataacgaatagtgttcgaccattaaggcctgcgatggcttccaatgcttgtccgtcgcaaactttaaatagttgaccgcgtaattttcatcattcatcgaaaacgcaaacgtaaaaatgaacggtaatgattgccccttcagatagcgcgataagctggaacctaataaggcgtaccgtaactccaagaaaaacatcatcaaaataatggttgtcatcggtgcattaattgtcagcatcgatgcaattaaaaattgggcgccaccggaaaagaccattaccgaaattaacgccgtcagtagatggttgaacccggccgcatgcaataaaaccccacaagctaacccgatgggaatatagctaagcccaagcggcattactgttcgtaataccactaaccaatttggctcgttctttttcaccaagaatgcctccagtaccataccagtaaagaattctagcaacaacagcgagcgtcaaattacttagacactcggacttaattttaacatgttttttattgcaatcctacaccttgttaagtttttaagtgtacgtaagcggtatcaataccattttttacttgaaatgttgtcccagaatcactaagtcattcggtcggccacctaattcagcgacttctggcagaaacccccactgttcgtacccaaactttttgaacagcttaatgcttggaatattacttgaaaaaatataagcgataatcgttgttaatcccaacacaggtaattgtttaggaactaatgtcaaaacctggctaccgattccctgtccttgaacactgcgatccaaataaactgaaatttcagtcgtctttgcatacgctgcccgtccataaaatggtgacagactaacccaaccgaccactgagtcgtcctttacaacaacccacagcggatagtgttcaggggtatgactcaaaaaccaatttcgacgttgctcaaccgtaactggtttaagatcagccgtcacttgatgactgggaatcgtttgattgtaaatatctacaataatgggtaaatctgacatggttgcagttcgtaatgatacgctcataggtgactttcactccattcggtttaactactgttatcagtcttcattatacagttaatcgtggatcatgctaacaaattctacataaatggaatcgcaatttatccgcaaagctagcattcaaatattagcaaaaaaagaaagaacgctcaaactggaacgcttgtagcgaatagtcgaagtagtgactaagataggcacacggcctaatttagggaataatttttaacaaagcacctcataattatcccgatttaaacgttgcttttttagcatcgccaaatgaagactattaatactctttttatcataacatccgcagccgttcaacttggtcatccttgacagtgcctttttgaaattactctggatgctaattatttttaattagctaaatcagtggcacagccctggtcattagttgcctgtcatgaatcactattgccaacaaaaaaatcctccttgagcaggcaagtctcaattactagcttgcctactcaaagaggaatatatcttttaagaaatatctcgtagcgtttactaagctaatgcatccacagaatctaatacactaactgctataatttagttgaaccagctcttaaccccgcgccacatccgtacaaagatatttgctttgtcgatggacttcttaggcgttacattgatggtcatattcttgctagtcgttccgtcaactaccttgatagctttcttgcttaggttcaagttaacagtaccgacagtcttgccattcttaacgggtgcttgtaatttaccatcggttgtcgccgacttcttcaagctgaccttaccagtaacagcactagcatccgtccccgttggcaagtaaatcttagtcgcaccactatttgaaaccagttgtgacgttaaggacttcccatcttgaacatcaacggctttcacaccattgatcttgccattcttgttaatcgtcgtagtcgtgtagttgtggtaaacatatgacatgatttcagccgtttgagtgaaacgttccgtcccactatcgttagcggcaccggcatgcatgacgaccgtaatgatccggttaccattgctaaacttaacggtcccagtgaaggcattcccagccttagtggaagtcccagtcttcaaaccatccacaggaagtgcggagtaatgtttaactaatcctttgagcatgtagtttcggttatccatcttggttgctgaactagtgcccttttcaaaccaagcatgggcaatgctagaagcctttaaaacttctgggtaatctgataatagcttttgcgcaacggtagcaacatcttgtgctgacatttcgttttcagcactggcggcaacgttactgtacccaatcgtgctgccaacttctttattggttaatccactggcattaataatggtggcgtccgtaataccccatgatttagccgtcttccgcatcaagctaacaaacttatggggcgtcccggctaccgcatcacccaaggctgtgatagcggcgttagcggaatagatttcagtcgcgttatatagttgccgcactgaatacgtcttcgttgataataacggtacgttcgcatattccgtgttttggctcatcttagcgactgccttgctaacactgattttttgattccaagacaacttaccttcatggatcgccttaagcactaaatatgtacttaacatcttcgtcattgatgcgatcgccattggcttactactgttcttatcatacagaatctgaccggtcgacgcgtcaaccgcaatggcggctttcgcagagatcgatggtgtactggctgcttgagcctggaggtcagcccccgcaatgcctaaaccagctgtactaaacgtgactgccgcaacgagggcaatcataactttctttaactttcccgcaaatctcatttctcaattatccctttcttaattgctaatgctagtttcagtttaaataattatgtctgtggaaacaagttaatttatcatatccgattgtttttttgttaatgggtggtcatgtttaactggcaaatgaataacaaagcttgtctgctcatcatcactttgcgcataaatatagccaccgtggtgatccacgatactttgggcaatcgccaagcccagtccagaccccccagtcgccttagaacgcgattcttcaacccgataaaaccgttcgaataagcgtcccaacgactcagctggaatacgctgaccatcattcgtgacgtgaatcacgacttcttcaccacgttgttcagcttgtaatactacgttttttgcaccagttccatatttaaacgcattagtgatcaaattgctgaagacccgccccagcttttcagcatcggcttcaatgtaaataggctgcgtgccactttctacttcaatcttcagatgcttcttgttcgcttccagctcaaagcttgccgctaactgttctaacatggccgtcaagtttaaccgattaatggccaacggtgtctccgtctgccgtgatttcgtatattcaaacagatcttcaaccagtgacttcatttgtgttgccttcaagtaggcaatatgcgcatatttaattaaatcctcttctgattggtactgtttgttctcaattaagcctagatagccgataattgacgtcaacggcgttcgaatatcatgactgacattcgtaattaacgcatccttagaccgctcaatttcccgttcttcgtccatcgagtggattgccgagtctactaaggcattaacactttcaacgactcgttgcgtatcaccagtcaggttaaagtcaatccgatggtcaaagtggccggccgcaatatagtgcaactcactaataatatgtcgtaactgcatctgcttgtatcgtcgaattaatcgccaatacaatacgaaaccgtccgcaatcagcatcagtccaataaagatattttcataactccatagctggtagttattgggaccaatggtaatcgatcgtttaatttgaaaaataccgctctgtaaccccggattatgcgcaatcgtactgttgatcagtaccacgatcgacaagtttaaaaggagtagcaaaatcaccgtcactaccccttcaaaaaacaattcacttttttcgcgtcccgttaatttcaaaagctaaccctcactcttaacgtgattcgatcttatagccaacgccccaaacggtctgaatgactttttctccatccgtggcttcttcgatcttatcccgcaaatgactcacgtgcaccatcacggtcttagctgagacaatactttcttgctgccaaacacgttcaaaaatatcatcagctgaaaagacccggttaggatgacttgcgagcaaatacaaaataccaaattctaacgcggttaattgaatatccttaccagtcaacgttttaacttcgtgcgaatctttattgatcgttaacggtccaatgtccaaaatatcaggctcggtagtcgtcacgttattttcagaacgtcgtaatagtgacttgacccgtgccataatttcaagcggattgaatggcttggtgacgtaatcgtcagctcccgtaatcaaaccctgaatcttgtccatatcgccagtcttggccgacaagactaggattggaagttgggaatctttccgtacttctttgatgacctcaattccatccatttcaggcatcatgatatccaaaatcattaacgcaatatcaggattcgtatttaatttagtcaaagcttcacggccattataggcgctaattggttcatagccttcgtttttaatataaatttctaatagttgtgcaatttctttgtcgtcatcgactactaaaattttcatcttatttttctccttaaataattctgtttttattttaccaaaaaagcgaccgggcttggcagttaacgattgattttagagaaaacgcaactattccgcgtcatcatttgccgtacggtgaactaataaccaggtatagtatccacctactaagatcaataatcccgccgcaacccatatcgtccgtaatgtccaccaccgctgcaatatcgccgaaacaatcgcgcccgtagcaaagctcaacactaattcccaatacactaaaccagtggccagctccgtgcgcacgcctgtcaaccaataattcgtcagcgcaatcgttgccttcttgagattaccggtagagaacacgttattatagccgtggccggcgattgcgctgaaggctgtcgtctgcatcgccatcacgaatgcgagtggtgggaccaccatcgcattactaacagtcgctggtagcatgccgaccattaaacaaacaaccagctctgccaccaaaacgggcaagcgccagtagtgtgaccgcgcgcccaaccattgtttcagtatacccacgacaatcacacctagtgtaaaaaagaggactgttgctaatttagtcaacacacccggtaaattccactgtgccacatcaacactgagaaaaatcaaattacccgtttgaccagctgctaagacaccaccccgttggatgaatgtgtatgcgtcaataaagccaccgatacaggttaagcccaagccaatttctcgtaactggaataaatggcgtgactgaaaccgttgcatctactcacctacttaatatgttgaatttggcacctcactaaactggtacaatacgttttaataagtccatcatagcgcaattaatcatcagtacctaacgaaaacgcgccttttaacccatgacaggttaagagacgcgttcataatcatcacatcattgctgatgattctattgttagctattttgggtggttaaataatcattaaacgctggtgcgaaatgggcatcaactaccttaacgtgggccgctttgaaaactgaccgaatcgtcgcaacttgcgtctgcttgtccatcatccgctgttgctggattttttcacgcaaataatttgtcacatcaatctgcttaccgctatcatcagttacagccgcagtcttggatcgacgactgacaacgttgataatttcataagttggtttgtctttcgtgtcggcagttgccataactgttttgaccggtttcgtgacatagtgtcccactcgtagtttagctgtggcctgtacaattgctggtgctagagtttgattataactgtcaaactgcgctaattttccagcagttgtgtgcgcttgtcgattattctgatattttcgcacttgcgaatcaaagctagcacccgcattcagatcagcaataattttttgcgcttgcttctcatcggccgtcgcaatgtgttgaaccgttgtcattggcatataagctgctcgggctttttttagttgtgctttagtcactggatacttagcactaatggctttctccatcaataaattcgctttgatttgcgattttaaacgcggttcagtgacatgattacgttctaaaatcatgtgataatttgcgcctgcctgccgtttgaatgcttttaatttagcagttacttcagcttgtgaaacatgatatcgttgattaaggactttgtttagagtcaattcttgaacagcctgttgcgtcgtcgcctggttttcaatttgtttaaatacttctgcttgtgtgacctggccagcatctgacttgaccaatgtcgtagccttcgcttgacaccctgttaacatgactgcgatgactagactcgcacctacccctattaaccgatacttcatttatattagcccctttctttgcatcactaataccacgatatcattaaaaatctaatgaacttaataagtaacacaatcgtgtacagagctagtatcaacgtcctaacaagaaagaagcactacggtcaatctacacgaacgttacatctgcctatattttctgctggtactcaccagacaaaaaaagcgtagaacaaagttgatgttctacgcttacttgatgcttattcaactaaaccaatcagactgactcatacgatatcgtcattttaaccgttgactgaatagttcggtgcattctttgtaatttgaatttcatgtggatgtgattcgcggagcccagcgccagagatttcaacaaactgggcgttttcgatcaaggcatcaatgtctttagcgccaacgtagcccatgccagaacgtaaaccacctaacatttggaagataatatcatcaacgctgcctttgaatggcacacgtccttcaacaccttctggaactaacttgttcgcttcgttcacgccgccttggaagtaccggtcagacgaaccatgagcttgtgacatcgccccaacggaacccatgccccgatagaacttgtattgacggccatcgtcaaagacaacctcacccggtgcttcggctgttccggctaacatactcccaagcatcacggcgttgccaccagcagcgagggccttaacgatatcaccggaatacttgatcccaccatcagcaatgatagctttgccgtattcgcgagcaacgctggcagaatcataaaccgctgttaattgtggcaccccgacaccagcgacaatccgggtcgtacagattgaaccagggccaatccccactttaacaacatcaacaccagcttcaaataaagcacgcgtgccttctgccgtcgcaacgttaccagcaatcaatgtctgcttagggaagtgggcccgaatttccttgatcttccgaagcacaccagcggaatgaccatgagccgtatcaataacgatggcgtccgcaccagcggcaaatagggcttcagcccggtcaaaggtatcactagtgaccccaacagccgcaacggccaacaagtgattgttggcatcaacggcagcgtgtgggtgatcatcatccttaacgaccgctttgatcttcttaacttcttcagcctgcgcttcaatgcttaagttcttatggataacagctaagccaccttggttggccatcgcgattcccattgcggattctgaaacagtatccattcccgcactaataattggaatattcagctgtaaattatcggcaagtttaacacctaaattgacttcattcggtaaaacatgactttcggccggaattaatagtacatcatcgaacgtataacccttttttccaaactttgtatcccaattagacattgaacgttagctccttatgtttttatttttatctgtaaaggtaacaaaacatcgcgataaatgcaaggggttgcgcagattttcagaaagttcttattttaagcctgtaacgcccaaccgaatgttccaggttgggccgagcgtacttcacacacaactttcattcagtcattacatccgtatcaccagtttaaaagctaactaggtgaataacaagcaatgaccacttgcaatcgacaaaaagacaagccaatgcacgccatcagcttgtctttcagtccgagcctaaaacatgctcgtcgtaatattaaagcgccgcttcaaccacatccgggcgaagaagacgacgacggcaatgatcaagtacgcgattcctggtaagaccgggttcaatggtccttgaatcattgacatggttgtaaagactaacatccaaacgatgatagccagtactgaccacgcgattttcttccataacgaaactttcttgccatctttagcaggcattaagtattcgaataacttagcaacgcccaaaccaccaatggcggacgtaatcagaatagcggtgatcccgttggcaccagctgaattcttagtagcgttcgtgccgatgaagcccatgatcccgtacattaagcagaaaatcatgaatagcatcaagccattgtccagcgccgtgacccaatagttcgccttttgacgttctaccggtgtcttttttggattcacaatctcttcggtccgttcttgaacggtcccgtataattgacgagccgtggttccccgaccttgttccgctaacaatgtagacgtcatttcattcagaactgccgtctttttctcaccactcaacgctgtggcatcaagtgacttgcgcatctgacgcatatattcagcattgcgcttcgtcaactcagtcgcttcgtgaactggccgttctgcggcttgagcctgcttggccccggccgcggcgttcctaggtgtctttgaagtttcgctctcactcactatacaattgctcctttcagcttaaacgttgaagcggaattcgacgatgtcgccatcttgcatgacatagtccttaccttccaaacgcagcttaccattttccttgacctttgcttctgaaccggcttcatccaaagcatcgtaagacatcacttcagcccgaataaatccacgttcaaaatcagagtgaataattcccgctgcttgaggggccttagtaccgcgtttaaacgtccaagcccgggtttccttaccaccagccgtgaagaaggtttccagtcctaatagcttgtaagaagcccgaatcagcttattcaagccaggctcttcaacgccttcagctgctaaaaagtcggccttgtcgtcatcatctagttcggcaatttcttcttcagtttcagcagcaacaccaatggctttggctccttcttgcttagcatagtccgcaaccacttggaaatacttagagttttctggatcggccatgtcatcttcggcaatattggctacatacagcactggcttagacgttaataagaataagcccttgacgatttgttggtcatcttcgttgaattctagtgaacgcacgggtttgccggcttccaaggcaggtttgatcttttgcaaaacagcgagctcagccttagcttctttatcgctccccttagcagcccgttgcactttagccaaacgcttatcaacagcttctaagtccgctaaactcaattctagattaattgtttcaatatcatcttgcggatcgactttacccgtcacatgggtgatattgtcatcatcaaaggcccggaccacgtgcacaattgcgtcaacttggcggatgttttcaaggaacttgttcccaagtccttcacccttactagcacccttgacgatcccggcgatatccgtaaattcaaaagtcgtgggaacgaccttctttgcggggatgatttcttgaattcggtctagtcgtttgtcgggaacttcaaccatcccaacgttggggtcaatcgtcgcaaatggatagttggccatttcggcgcccgccttcgtaattgcgttaaacaatgtggatttaccaacgtttggtaacccaacgatacctgctgtaagtgccatatcggttattcactcttccttttttaataattaagcttgatcggctttgctttctaatacctttttgagttttttattgaactcacgacgcggcatcatgaccacgtgaccacatcccgtacatttaatcttaatgtcagcgcccatccgggtaatttcccagcgattgacaccacacggatgcgcctttttcatctcgacaatatcacctaaatcatacatgcgcaacgcccctttataaattaattaatttaaatcaatactgagaatttctaaaatccgtgtcaaatcttcatttgacaagtacggaatttcaattttcccttgatcagctttgttcgccttagtttgaatcgaaacggccgtcccaaacttctcttgtaattgttcttcactcgcacggatgtacggtgacttcttgggtgcaacttttttggccggctccttggactcgccgttataacgcgccacgatttgttccaactgacggaccgtcatgttatccttcacgacgcgcttcgctaatggcgctaacttggttttatccttcaaagacaaaagcgttcgagcctggcccatggacagttggcccttttggatatactgtttgaccccatctggcaagcccaataaccgcaaataattagcaatatatggccgactcttgcctaggcgctttgagacttccgcctgcgtcaacttcagcttcttcatcaacgaatcgtaggccgcagcttcttcaagcggagttaaatcttcccgttgtagattttcaagcaccgctacttccatcatttgttcttcggtaacatcacggacaatggctggaatagtcgtttgatgagcgagcttcgacgcccgaaaacgccgttcaccagcaatgatttcatatttattcagctcggcatccggttgtcgtacaatgattggctggaaaacgccggacttttcaatcgagctggcgagctccttaagtgccgtctgatcaaaagttcgccggggttggtacggattggcatgaatatccttaagatctagatcaaccacagcttcttcactagctggttcgttaacatcggcaaacagggctccaataccgcgtcccagcgccttattatctttatctttacttgccatgagcggccaacacttcctttgctagagctaagtagacttgcgcacctttcgaacgggcatcataatcgacaatcgataggccgtggctaggtgcttcagataaccgcacattgcggggaataatcgtcttatagacggcgtccttaaagtatttccgaacttcttcgttgacctgggctccgagattggtacgggcatcgtacatagtcaatagcacgccttcaattcgcaactgtttattaaaatgtttttgtacgagcttgatcgtattcaataactgactcagcccttccaaagcatagtactcgctttgaaccggaatcaaaatcgaatcacaagccgtaaacgcattaatggtcagcaagcctaacgacggtggacaatcgatcaaaatataatcataatcatccttcacgtcatcgatggcatcacgtaagcgggtctcacgtgccatcatcggtgtcagttcgatttctgccccagaaagctgaattgtagccggaacgatatctaaacccttatgactcgttgggataatggtttctttaatgggaacgtcattgattaaaacgtcatagatttcacgttcgatggtcgacttttgaacacctaaaccactggtcgcattcccttgcgcatccgtgtcaattaataaaactttttggcctaattcgaccagactagccccgagattaatactcgtggttgtcttgccaacgccacctttttggttagcgagtgcaattacggttcccataattattgatcaccccttggttgattttttggaatttcaatcgtaatccgatacccgtcatccgtatcctcttcatgggtcttcacgggtaagccggcatcagttaccatcttaattgattttttgatcgtattcacagcaattcgcgtatcgccggtcaacccccgtgcacgtttgcgtttgggcttcggtggcgtttgggtcttcgccactagctgttctgtttctttgaccgtcaattgatcagcaagcacccgtttcaaaaccgcagcctgttgctccacagccaagttgagtagtgcgcggccgtgccgttcgctgatttgtcgctgcaacaacgccgtttgaaccggctgtgctaacttcaacaatcgcaacttattcgcaactaacgactgacttttgcccaattctttcgctagcgccgattgcgttaattggttgagttccatcagttcttggtaggcccgagcctcttcaatggccgttaaatcttgtcgctgtaaattctcgatcagcgccattgacgcggtttcaccatcatccatcttttgaatgatggccggcacatctgcccaatgaagtgaagaaatggcgcggaaccgccgctcaccagcgataatttcgtatttctgcggttcgtattcccgcaagacaattggctgcaacaagccgtgatccgcaatcgtagcagccaattcagcaataccagtttcatcgaagacttgccggggttgaaaccggttggggataatggcagtgaccggaatacggacaatttgttgctccgtgggggtcgtggccgcctcggttttatgtttatcacgattagaaccaaataatgaaaatgccattgaaattacctcccaccttacattggtgccgttaacggctgtttcgccggtgtccccggcttgcgtggataccgcttcggtgacggcttcttcttatcaataacaatgatatggcgcggatcagcagtcacgggcaaactaaaggcctcgtcctgaacaatttggccccctaattgttgaacggcgtatgtcccttcagccgtttcagtacgggcattggctgctttcaatgcaatcatctggccgccaattttaacgagtggtaggcagagttcgctcaatactgataggcgcgctactgcccgagccgtcacgatatcgtagctttcccggtgagcagacttcttgccagcaaacgtttcagcgcgatcatggaacgttttcacacccgttaagcctaattgttggactagatcatttaaaaaattgattcgcttatttaatgaatcaacgatcgtcacttgtaactgtgggaacgcaattttgagcggaatcgacgggaaaccggctccagcgccaacatcacaaatcgtgagcggttgatcacgcagcgcaggaacgtagaatgctggcgtgagtgaatcgtaaaaatgtttaagataaacttctggttccgctgtgatcgtggtcaggttgaactgcttattagtcgtgaccaatagttgaaaatacagcgcaaattgtgccaattgttttgccgtcagcgcaatctcgtgttgggctaacgcttgtttaaattcttctggattcattagtaatagctctccttaaaggggtcacattcgtcctctttttgtgaaacaactcaatgtttcacgtcacctcataactttaacgtaaataacacttaaaatcaatgcacagccccgctgttaaaatcgcaataacccttgaaaagtctgcttttacagccatcattgacagctattctagtttgcaatttttctagtcaaattcatgaaccgccttgaacatctcaccgttaaaaacgacaccggataaaagtatgaccagatgattcattaataaaaaagaggccagccgaatagctgacactcttacgtttaattcaagattaaattatatcaccgactaccaaacgaacaacccaacgacaccggctgatagtaaggagaccaggatcccagataatagcatgtaaccaacattccgtgaaatcaaatcgttcttttcacgatcaacgattcccttgaaagccccaataatcatcccaatcgttgagaagttcgcgaaggacgttaagaagaccgttaagactgcccggaaatgcggtgcaaaatcgttaactttgccggaaacttcacccatgacaacgaattcgttagtcactaatttcgttcccatatatgaagccatttggaaagcatcacttgggttaaagccaagtaaccatgcaaatgggaacatgacaaccccaaagatgttttcaagtgataaattgctattgatcaagcctaacaacttatcaattaatttggctaacgctacgaaagcaataacgttagcagcaataatcaaaatcaagcgaccagcgcctaagattgaatcacccaagaaagagaagaatggttcgcgagctggtttagcttccttaacttgttcattagctaattcttcagaaccgctcgtttcagtggtggcagtagtttcttcaacagccgcactacctgagattttcgcaatggtatcttcttccggcttaacttcgaccggattcaagattgcagcaataatcgcagcgtttaagacgttcattggcaccgccgtcaaaatgaattgaccaggcatcatcttaatgtaagcccctaagatagatgccgtcacacaactcattgacatcatcgcaatcgtcaagtttcgttgtgccttcatctgcttcaattgtaactgcgaaacagcaagagcttccgtgttgcccaagaacatcatttcaacaacgaagaatgattcgaactttggttgaccagtaatgtaagctaagccccggccaacccatttgataatccatggtaatacgccaatataggtcaaaatatcgaataatggcacaatcaacaagattggtaataatgaactagtgacgaagtccatcgacttaacgttaacccaactagctaacgcaaaggcgatcccatcgtatgatacattgacgagccaagtgaagccatctgccgctgctttaaccgcgtcgacaccgacttgtgaacccgttaagaaccatgccaataagacttctagtactaacatgacaccaactgaacgccagttaatggcgtgcttttgcttggagaataagtaggcaatggcaataaaaaccacaatcccaataatattaactaccaagttaaagaccatgtgaataatccctcttccctatgaatgtaagaaatatgacaaaactacttctattaatttaccatttaatacgcacttgcggtagcactttttaaagaaaagcttaagttcttaattaggccgtaccaatttattgaaaggccccgtccagatagtgctggtaaccgtgagaattttagttatgtctgcccaatttcattctaaattttagtaattctgctaatcagagatcgaaaatttaggcccatcttgattaaccgttaacttattgtgactagaattaatttattaacttagtaatctatctatttccatcataaagacaataaggtctgatccatgtaacttttcttaaataactacccacgcttaatttgacgattaaataagcaatatttaattgtactcaaaccgactatcacccaagcaagcacggaccaccatatactaatgactgtcatcattttaggctgataggataaatcaatatggtttgctccacgtttaccatgaaccattggtgtactaattatcgatggtctcaattctttgtgcgctaacatttcaccattcaaaataacttgtgtattgccataaacaaccactggcacccttatttgacgtgctcgcttttgattccatgtcaaccgcaacacgccacctggtaacacttgatggtgaaatttagatttaggagaaatcacatatcggacatacgcactataataatcagtcgacgtcgaataatttccctgaataggcacatagtcaggagtacgacggtccactacctgaattaatgcacttttatctttaacatgaaacactggttgtaaatctgtaatagttttaatttttttaccatgataacggtgggcaaacacattgttatcatttgttcctaaaccagcagcaatactgatattaggatcactttgacgagctacaaaggttgcagcagctaccgctaaagatactacggcagaagtggctacgattgtagttaaaagtttaattcctgcttgagtccaatgaaaaacaccgtttaaccgtaattcttgtacaactaacatatcactaagaaataggaatgataatccagtaataataaatcgtcgtggtaattgtaaataactctctaacgctggccattggagaccgataattgaccatggtaccagattagttcctaaaacaagatacacaaccgccataattgtcaatgtttttgtaaagccagataacgttcgccaaaataaaagcagtgcagcaagtgcaccatagaaaaacaaactgataattggaagactgagtggacctgaatgatctgtaaaaggaacaactgcattcgttacaccatttattaatggcatgtttgttggtggtaacaaatgactacctttaagtagctctaaatatggcatgatgacattcaaacttaaaaccagcgccaataggattcccattaatagtcgaccaagtgctcgccattttgactgtgtttttattaatccaataacaaaaaacggaactagtattggcaagactaatgctgccgaaattatctgagcttgtgcaataattccgacaatcacccctaagaagagcatttcacgtaatgtccagtctccagaatagaaagctttcataggaccaataagtaatggtacaaatgcaactgcgagcgcccgccaactcgtgctatacataaatccatatattgaaaaggaagtcatataaatacttgctaacgctacacaaatagcaaaattgaatttcaactttttagcaccgtaatacattgaaattcctgcaaagaagttcactaatatcattgaaacgatttgaaacttaaaccatgtgcccgttactaataagatggctccaaataggaaagtcaacaagggactatagacttgatttacaatacgtcccgcttgttgaaaagaatataaatttaaaaaactaaaattgccatgtctaatttgcatttcagcttcataaatacgattgtattgaaaataactatctacacccaaaactccaacttgatttaatataattggtaaaatagttaatactgcgataattaatataataatccatgcacgactagcttgccgccgattccccaccataaaatattcccctttttatttaaaataattgtaacaatatctagcttgctaaaattaattagcaagtttagtactaaaatcccccttaatttttacatttgatgccgtaatggcatgattcgttcattatatcaagattacttaacaattaaaaactctcttacactttaacgataatgttttttggtattacaaataattcataacagtcatagatttccccctttccaaccactatggttacttttgaaattattattatgaactaacattagagatgctatttcaaatcaaatgaccattcatataattatcacctcaagctaggctgagaatacaattcacctatcaaaaaagttcgattcgtcattgaatcgaactttttctatcagctcccattttgaataataaaccaatgatgaactgacttgatgacaactgaaaattcagtcgttaagtaccccgcaaccgcggagtgcccctgccaaggaattctattataccgcgtttagtccgtttgcgaactaattagttgacctgaccattaaatgggactaaactacggacaattaatgaaagggggtgatgctttttgagtaccatatgtaatcttaaagcatcagtctctgccctattcggagcacatgactgatacctttaaggagtcccgaccaaatttacttggtcgggacttttgctatctaaaagtgtgtataaacagttgcaagttgactgtgagtggcttacattaaaagtgcagtttatttggagatatggagtaacgggaaatatgaaagcaacgacaaaacaagtattgacaggcgctacttggctagtagttctgctagcaatgatcggtggtaccatgctttggcaacaacaagtccacaagtcaaaaccggtcaccaccataacagtgacttctactgaacgtattccaatggtgctcttactagatgaccacttaactcacaatcagattcagcaattaactgcccatattcaaaacagtagcgccactcagacactggtcaccgccaaaattacagcgacggggaccgtgacatttaaaggacaattgctcaacagtgacaaccgcccctacatacaagtgcaactgcccaagaaccttgattcaaaccgacaaacgcatttattaaagcaactcctaaccgccgcccgccagcagtttaaatttcgccggtttaaccttgtcagttacggtcgtggcggtctcactgccactaactatgtcgaacacacaacaacaagcttatcaccacaacaccttgtactgatggccaccccatttaacggcaccagccgccaaagtaacaatcgtcgccaaacgacgccggttgccgccgagtcgcaaacggccacactagccaaattgattgcacaccgccataccatcgattccaagatgcaggtattgattgtcgctggaaaagccatcaaagctgaccaacccctaccactgcaaagtgccctggctggtcaatctatcttcaagccagtggtaagggtctatcaacaaaaagtgttgcgctcatggcgcacccaatccggcttactcaacaaccatcaaatcggtaatacgattcaaacgtttataaactgatttcacccgtccaatcgacctagccatcatttttgctcagagtgcttatctaaaacatatctaaaatattaatagccacctttcctgacaaccaacttggtctactggaaaagcggctatttttagctttaattgtgcgatctggtcgtagtaagcctttaacgttaaaagcagccagcttaagtccgctgaaaaaagtttaagttagtgccaaccctgcctggttgagcgcgtcctacaacgccttccagtcgggatagcgttcgaatggcggacatgtgcgtattccgtttctgatgaattggccgtggctattttagcgacagcgactttgccatataactgtcagtctgataatagaattacgactgttccatgatctttatactgaggtattcaaaacagttgatgtcccattaacatttgttcaaagttcttagtagtaaataataatttaacgactaattgcaccagttaggcggtcgttcatctacctttcgagtggcttcccgaaacatgctcaatgccactgaagtctgtgctggctacgccaacgctctgccctaactttgctactgccataacatctgatccggatactccttggtcaaaaactgtttaatggcacgaatcatgatagccgttgaaggagcggtcgcctgggttttgttggcaactaaggcaatctcacgattatagggttcggcaaaggaaaacgtgttaacatctccagttagcttccgtagtgctagctgaggcaaaatgcccatgcctaaaccggattctaccattgaaataatagattgatcatcaatcgagaatcgtaaaaagttattagtaacgtggtagtggtccagtgctagcttggtgtcccggtcataatcgctttgttgtagaataaagttcttatccgcaacgtcatcagtcgtaatgaattcaccattttctgggataaaatcagcgggcgtcacacaatagattggatcattgatcagtgaatgcactaataagttctcattgactggcatcgacgtaaacccaatatcgatagtaccgatcttggcccagttggttatttcattaaagttaccttgcatgactgaaatcttaatatcaggatatttatgattaaattcgcgaataattcggggtaaccagttgatacagacactactgaaaccgccgatccgtaccgatccagagtgcaatccttgaatattatcggcaacttgtcgcaagttactttccgtattcagaatctcttgaacatagggtaaaacctgccgcccatcactagtaagttcaacgcctgaacggttacggatgaatagtggaaaacccagttctttttccaactgattgatcgaatgactgaccgcacttggcgtaacgttaagcgtagcggccgcttgatagaatgtgtgttgggcaacgaccgttgaaaagacttcatatgcgaagtttgccataatgatttacctctcttaggtgaatttatttcacttattattgaaaaagttgagttttactaattacaagctttattttatcatattgataatcaaagaaaacagtttaagtacaaaaaactgagtgggggaaaattattatgaaaaaattatttgcaaatcgcgtgttaaacaatgacacttccgacctagatgaggtcttcaagaatagtgcaaacccggaaaacatttccttcgctggtggttttccagatcagcacttattccctgacaacgacttaaagcaagcctatcgtgatgctattgaacacgatggtcaaggcatcttccaatactcatcaactcaagggctaccggcattacgccaaaaaattgcagatcgaatggcgactcatgctgacgttcaagttagtgccgacaatgtcatgatgactcaaggtggtcagcaagccatcgacctcgtggcgaagctcatgttgaaccatggagatgccatggtcgtcgaaggcccgacttacatgggggctttagccgccttcgacacttacgaaccgacttactacgaaattccagttgatgataatgggatgaatattcgtcaacttcgtaaaaccttgaaagctcatcctgagatcaaattgatttacacgattcctgacttccacaatccaacgggtacgacgatgagtgccaaacgtcgtcaagcactcgttgcccttgccaatcagtacgacgtcattattttggaagacagcccgtaccgggacctccgttatagtggtcaaaatattccggctatcaaacactacgatactgaaggccgcgtcatctttatctcaagtttctcaaagattctctccccggccttgcgaacaggctggattgttgctgacgacgcaatcatgcacgaattggtcggactgaaatccgcaatcgatgttcaatcgcctaatgtaacactggctgctatcaacagctacctggatcaacacgatatcgacgatcacgttgcaactatcagtgcttcataccgaattaaacgtgacgcgatgttagccgcactcgatcaatacttcccgcaaaatgtccactacacccgtcctaatgggggcttcttcatctgggtaaccttgccagaaggaattgatgctaaaaccttgctcaatgacgttgttttaccacaagcacacgttgcctatgtgccatccgcttgccaattcgcaagtcgcaaggttaaaaacgggttccggttgaatttcactagtctcgacgtcgaaacaattacgctgggaattaaacgccttggccacatcttacaaccggcaccagtaattgttccagcagcatcgttcgcaccccaattctaacttgacccactcatcatgcgactaaccgtaataattgcgattagtcgcattttttgattacatctgtcagctgtaatgagtggtcgtgctcctgaatattagcactttttatatcaggatccacatcaaataagccgtacgctttacgaccatttatactgtatcagtttgagcacccgcgcttgcgtcgcttttactgataaaaaagggtttgacagtccttctctgattcgctacactaacgctatactagccgattatgaaataagcattggtccgtttgcgacactcaatgcttattttttgttaacagcttcattttcggataaactaggagtgttgtgaaaaatttctaggagtgtgaatcatgaagtcatgggttaaaaaattaggcgttgcagtgcttgggttaggtttagcagttacattgaccgcctgtggtagtaacactagcagcagttcaaagtctaacgacctcggattgcaaaaatcggggacgttgacgattggcttagaaggcacttttcaaccatatagctaccgtaaagacggtaaattaactggtttcgaagttgacctcgggaaagccgttgccaagaagatgggactaaaagctaaatttgtaccaacgaagttcgattcgttagtagctggtttagacacaaacaaattcgacgttgtcatgaataacatgtccgaaacggcggcccgaaagaagaagtatctcttctcgaccccttacatttattctaaatcacaattagccgtcaagaagaactcatcgattagtaagattaccgatattaagggtaagaaagttaccgaaacaacgactagcaataacgcaacggatgctaaacgtttaggtgcaaccatcaccccaaccgatagtttccaacagtcgatcgacctcgtctcacaaggccgcgttgctgggactattaattctcgtgaatccttctatgcttacttcaagcagaatccgaaggctaacattaagctgattgattccggcgatcacattgcctcacagaaaatcggggccatcgtcactaagcaacaccctaagatgcaaaaacaaatctcgaaagcaatccaagaattacgtaaggacggcacgttaaagaaattgtccaataagtattttggtggtaacgttactgataagtaacgtaccattgcccgctattatggcgggatacatagcaccaaattctaatttgttacaggaggctccctatggattcaatctggcacatcattgtcacatcaacgccgcaaattgctgcagcgggtttaaaatataccattccgattgccattatttcatttattctcggtttgatacttgcgattttcacggccctcgtcaagatttcgactcgtcgtggttggtttttaattctgaaagccatcgctaacttctacgtctggctctttcggagtaccccactgctggtacaactctttatcgtctatttcgggcttccctaccttaaaatcaaagggctctttccaaatggggtccagctcgacccctggactgctgggattgccactttttcactgaacaccggagcttactgtgcggaaacgattcgagcagccattctctccattcctcaaggtcagtgggaagcggcctactcgattggcatgaccaagtcacaagtactcaaacgaattattttgccgcaagctgcgcgagtctcactaccgccactatccaatagttttattagcttagtcaaggacacctccttggccgcttcaatcacgattattgaaatgttcgaagtcagccaacaaattgctgctcaaaattatcaaccacttgtgatgtactccctggttgctgccctatacgcaattctatgtacgattctcagctggctacaaggctacttggaaaagcggacgtcacgttacttacggccacttaattaggaggttgtcgaatgatcaaattagaacacttaaataagacgtttggcaatcaccaggcgttaaccgatatcaatactgaatttaaagaacaccagacgaccgtcatcgttggcccctcgggttctggtaaatcaaccttactgcggtcactaaatttgcttgaacggcccgaacaaggtttataccacttcaatgacgaaactatcgactttactaagccgttgactaataaaacaattctcaatattcgacgcaaaactgggatggtctttcaaggttataatctgtttccccatctcagcgttgttaaaaatgtcatggaaggccccgtgcaagtcttaaaaaaggattccgcgacggctaaaaagtccgcgctagaattgttggcccgggtcggcttgcaagataaggccgacgcctaccccgaacaattatccggtgggcaacaacaacgggtcgcgattgcgcgctcgttagcgatggatcccgaattcatcttgttagatgagccaactagtgcgctagaccccgaactcgaagctggtgtgctccgcgttctactagccctcgctcaggaagaagactccatgattatcgtcactcacaacatggaatttgcccgcgcagttgcggataagatcctatttgttgaagatggcaaaatcctgttcgacgggacacccgctgaattctttaagcagccaacgcaacgaattgccgacttcttagccgcgatgacgttcaccacgatttcagacaaagcaaaccaatagcgttcatttgagttaacgtgcatctaactggaaaatcccagtcagatgcacgttttttagcaccccctagcgtctcacgtcaactatcgatctggcgcattcgcaacaaatggcatttagattaatataaaatgtgattttgatttgacaattgttatttaatcttgtagactagcctcaatatctaaacattgtgatgagatgagtagtgtgattgccacgcaaagcgagccgttggttggtgtaaaacggtcggacagtgatacgaagatggtctctaaatggtattggtgagcattagcaagccagtaacgcgtcgtacccgttagcgtactgagtgaattagctcattgagccaagcgttgtgcacgcgcttggaaactaaggtggtaccacgatcagcagtcgtcctttttcgataaaggacgactttttttgtcaaaaaatatagctctacgggggtaatcgatatgaaaaaatggctcaaagcagtaagtttaacaattttaggactcgcactaacagtcaccttgacggcatgcggtaattctagctcatctaaaagcagcacttctagcacaagtagtcagctcaaattgcaaaagagcggcacgttgacgatcgggctagaaggcaccttccagccttatagctatcgcaaagacggtaagttgactggttttgaagtcgaccttggtaaagccgtcgctaaaaagctcggtctcaaggcaaagttcgtcccaacgaaattcgactccttgattgctggcctggatgtcgataaatacgacgtggtcatcaacgatatcgctgaaactgcgcaacgtaaacaaaaatacctcttctctacgccttatatctactctaaatccgaattagcggtcaagaaggggtcctcaattaacaagatcacggatatcaaaggcaagaaagttgcccaaacaacgactagtaataacgcgaccgatgctaaacgtttaggtgcgaccgtcacaccgaccgatggctttcaacaatcgatcgacctcgtaaaccaaggtcgcgtcgccggaacaatcaactcacgggaagcattctatgcttacctcaagcagaatccaaaggccagcttgaaattcattagtggtggttcagaaatcaaaacacaaaagattggcgcaattgtcactaaaaagcacgcctcactccaaaaacaactgtctaaagcgattcaagaactccgtcaagatggcaccttaaagaaactgtctaataaatactttggtggtaacgtcacaaaccaatagccatcgcaatctatttgataacgtccagttgatagtcacaaaaagcccggaaaaccgggctttttgtgtgtgtcggcgtctttcagcgaccatcttttatcactcattgtgtttctaaaaaccatccgggaccatttacaccattgcttatgtcgtgaacccggtcagctaattcaactgatttgcaatattgaatttcatcttgccatgattgacttccaaccacatatatttggtgttcttaggcgacaaaacctcaatatgtgaatatttttgattgtgattcttcgcgattttttcagagcggctttgcagtgtcttggctagtgactgccacgaagcggtcttgccttgatcgacactttcaataactggcgcttgctttgatattcgcacacgcatggcaccaccattccaactcactttaaccttgccatattcagctttattcgttctgatttctgattgaatattggctgcaagcgtattagcttcccgagcctgatacaaattaaatccaatctcaaagacaatgactagcgcacagataactggtggcaaccaaaaccaccacgtccgtaagctctttttttgatgatgcggctgctttaaagtcgtcgtttccgcgtctttacgcttatcctcagcaactgtcggttgtccactgccacattttccacaatactgggcactttggggaattcgttcaccacaaaccacacaattcttcatgtccgtttccataattgccctccgtcataatattatcgataataattaactcagccatgacaattaactgtattaatatttcaatataatgattatatatcgaaatcagtcatttttctaggccttatcagatcagtatagtatcactcttgcgtaccggacagctggtattcgctgagcatcatgattttaagctttagtacgggcctatttcagtcaccgttagcaagcacgttttgcgtttactagtggctaaaagtagtttgccttttatcattattttaatatttaagtttgacagttagtttcacttcactgtatactactcattgagcaatactatacgacgtataatatagcaggagggatagcaatggccattcaaattagttccgagttattggacgggtgcgttttagcctgccttaaaggccaagattactatggttacgcgctaacgcagcgcttgcaagccgccatctcggtgtccgaatcgacgctctacccagtgcttcgacgactcaagaaaaatgactgggtcacgacttacgatcaggcctatcaaggccgcaaccgacgctattatcagattacgagcgccggcctgacacaattgagtgcgattcaacaagagtggcaaacctattatttggccattaaccacttacttcagggggaggatgaatcatgaacgactacttatctaaatttaacgcgttactcgttcaacttaccgatgatgaacgcgacgaggtcgttgaattttatcgcgaatacttgctagacgcggcaatcgccaattatgatgattgcgttgcagaactgggaacgcctaaacaattggctcggaaagtgttagccgattattcgattcgttttaacgaaaatctcaacgccaatacttctaaacggcaaaaatctcaagcaaccgtacgcacgatttggctaattgtgcttgctttattatcaacaccgatcacaattcccgcattaatagttattttagcggtcttctttgccttggccgttaccgtctttgcattcgtgattgcagcgggtgccatcttaattggcgtgaccatcctcgcatttgccatgctaacagccggcatcggtatcttcggccagtcgctatgggtcgcactattctacctaggtagcggtcttgctattattagtgccgagctattagttttaccactatttatctggcttattagcgttattctgcaaggaattgccaaaatcgtacaaaacctataccaccgatttgttaagaaaaatcgggcggaacgaggaggtcaccaccatgcgaaagacaattagagttggcattattttattagttgttggactgcttctaatcatgtttggaattgccaataacggtattcaaagcgtctattgggaccagggttttcacattgttcgccataagactcggcgctaccacgtcagtcagctaaaagatatcacgattgcaacggccaacaatattactattaagcaaggcacagctgctaatatcacggttaccgccacgcgcgccttaccaactgttacgatcaacaatggtcacgtcactgttacttcaacgacacacaacgccaaaaccgtgggcttcatgttcgataacgtcggacaatttgctgacacgacaataattacggtgcctaaaggaactactattcatcaaataaccgccaaagctagtcaaagtggtaacgtttcgttgcaaaacgtcaccgtcgaccaattgaaaagtcttagtacggatagcgatattaatttaacggatgtcaaagtcaatcagtcgctgacgttgaccggcgataatttacggttaactcgtgtctcggcgcctagtctacaaatcaatagcgatccagatatcagcatcaccgacagtcattttaccaagactgcttcaaaaattataaccgctgatagcgacatccatctaaccaataatcagttcaaagcccttaagctaacaagtagcgaaggtgatattatgctcaataataatcgcatcactgaaagtttatccgctacagccagtgacggtgatattcgaataaccgcgccacggacagccggtgttaaagctagcactagcgatggggacttgcatattttcaatcatctccagtccgatggcggtgattaccaggtcaaccaatcggcagccgtacaataccgactgacgaccagcaatggtgatattacggttagtgctagctagtccatgctagtactgcacttactcaaattttcaaaataaaaccgcggcttgctcatggcaaatcgcggttttatcgtacttacgtttaggatgctgttgcagtcgtcatttccggacgcccttgaatcgccagcagtgctgctcccgactgaatagactgattaggttctgattctatccgttgataatttttactatttgtcacaatcaccatgaccgtgtcatctaagttagcagcttttaacaccgttgagtcaaactcacctaagagatcacccttttgaacagtttgccccggtttaacgacaactctaaagccttgcccttttaatgacaccgtatcaataccgatgtgaatcaacaactcaactccattattggttgttagaccataggcatgtcctgtatcggctacaacactcatctgaccactttgtggcgcatagacttttaccggcccctgttcctgtggcttaattgcaatgccgtcccccatcatcttagatgcaaagaccggatcgttaaccgtactcaaggcaatacttttaccagaaactggtgaaaatatcgtatcatccacaatctttggttgtacttgatcagattttaatatgtccttaggaatcgcaaacatattagtggcaataaaagccactgctaccgtcaataacgagacgaccgtataaatcagcaaatcacgagcattgtaaatatacatcagataagagggaacaacggctagaccatatgaatttgctgccacactcataacactcagtacgccagcacctatcccactggttaaaacggttacaaccaacggcttgaaattatagcgaatcaagaccccgaacaaggttggttctgaaacaccaaatagttgcgaggaaaatgcgccaataaaattagccttagccttttgtgactttgctcgtaaaatcatcgccaaagctacccccagattagcaaagccatacatggcttctaaagtaattaacggattgagcttggtggctgctaatagtgacgtttcgatggcaatcatcatctgatgaataccaactagcaccattaacggataagcggctccaatcaaaaaaccaccaattccaaatggtaagttaatcaacccttcaacaccactaatcatcacattttcaatccagtgtacaaccgggccaacccctaaaatcataataccaaaagtaactaacatcgttaaaaagggcgttaaaatttggtcgagaacgttagggacgtgtttatgaaagtaatgctccagtttacttccaagaaaaccagcaactaacgctgttaatacggatccttgactaccgataactggaatcctgtcaaaaagcataatcgctttcgctgtaccacccgcaactgaatacgcgttaggcagtgaaggggaaacgagcattagtccaatcacaataccgacaattggtgtacctttaaaatagcgaaatgtggaccaaacaattaaagctggcagaaatgaaaaaacagtccccgttaaaactgaaattactgtattaagacttgccggaatcgcggcagatgaagttccaaacaactgtaaaacctgattgttagtcaaagcactttgtaatcccaagaaaagtccagtagctgcaatcaccggaataattggaataaagattcccgaaagcattgccatgaatcgttgcaatggtgacttctgattatcaggagtcggcgtagtcgtcgtttcctgactataaattgcattaactaaatgtaacttttcaattgcgtcatacacatcgttaacaacaccagtgccaataatgacctgatactgtcctgaaccgaaaaagactcccttagaatctgtttaaaatctttttaagagtaatatcaagaaagcgagaatgatcatttggcgacttgaattaaggtgccgctcacaatttttccagagccgacgacatttatctaaccaactgaaagaacgctcaataatccagcgttgtggtaacacttcaaatttatgtagctcattgcgtttagccacctgtacggtggcttttaaattggattgaacagtggcggcgaagttgtccccggtgtacccaccatcaacaagaactgatttaacttgttgtaaatgttcacagtttagcgctagcatggcactagccccatcacggtcagaaacattggcagtagtgatatggattgcttgtggcaaaccgttaatatcaacagctaagtgacgttttattccagatattcgtttaccaccgtcgtaaccatgatgcttggcggtatcagtatttttaacactttgggcgtcaattattataaaagatgttttagccgagcgtgactgtttttcccgtagggtaaagacaatttttttaagcattgatccaaaatagaaggttcatcaaggacttgttcttcagaccatactcgataataataataaaccgattgccaacgaggaaaatcaactggtaactgccgccactgacagccggtttttaaaacataggccaccgcgcaaaataagtcgtaaagatcatatttccgtggtctggttgactgtcgtgcaccttctaaaatgggacggactagttcaaattgtcggcgagaaatattactgggataattcattactgatcaccttttttgaactatcataccaaattagctagattttaaacaggttcttaacctcatctaagtcttcaagtgctgctttatcaatctgcttaggatctttaacaacaaaccgcaaccgtgtctgacaatgagtaaccgattcaacattgtcaacaccaacaatatcaataatttttttcgcaagtacctgatagtttttactcatttgaattcacctcaaaaagaatggcttgatatggttccaacgtattgagtcgataatgtgcgtaattatttaatcgaggtcggccattaggtaacgttaggaataaccgttttgcgcttaagttaacatacacctgtacccttcgaccacgttgataagcaatcacttggtcacaatcacaagtaattggcctaaaatcaccgactattaaatcctgacttaaatttgatatttgccgtaacttaatcaatgactgataaaaatgccaaactgaatttgaatctaattgttcgctttgccagtttaccctatcatgtgactgttttggtgtaatccatggcttggcaccctgattaaagccttgattgacggaatcatcccatggatatggtaatcgcgcattatcccgggaacgagcatttacaaaggcaagtgcctcgcttgctgaatatccctcttcaatagcacgatcataattatcgtgactgctcaagtcgttaaacatggtaattgagtcacgccgtgcattggtcacccccagctcttgtccttgataaataaatggacaaccgcgcaagttaaaataaagtaaggctagtgctttggcaccaatttcattccgataagctggtgtctgaatatatttatcaatactccgcggctgatcgtgattttcaaaaaagttagctccccagccgacattttgaatcgccagttggcttttaaaaattgcgcgccgtaagtccgtcggtgtccacttaactcgtcgataccactctgatccggatgcaatatcaatatctgcgtaatgaaagtcaaaaatcatcgagaagtaaccttttttaccaataaattgtccaagttggtcataactaacccccgaagcctctccaaccgtcaccgcgttagctggtttaaaagtagccgtgttcaattcagctaagaacttttcaataccaggtcgattttcagctttacgtttgactttacctaacccatcaacaccatcaggactaatgctggcaaaatcttgatctttttttatgaatgttattgcatcgatccgaaaacccgcaaccccttttgccaaccaccaattaatcatttgatagattcgtttccttagagccggattttcccaatttaggtccggttgttgtttagaaaagacatggtgataatactcatcctgacttcctggcaataacgtccatgacgagcctttaccaaagtttgatcgccaattattaggcggattgccgtgtgccccacgccgaataatataaaaatcacgatacggactcgtcggcgatttaattgcagattggaaccacacgtgctgatcagaggtatgattgataaccaaatctaaaatgacttttaatcctaatcgtttagttacttccatcaactcatcaaaatcagccatcgttccaaaccgagaatcaatagcttggtagtcagaaatatcgtaaccgttatcaaccatgggtgattgatatattggagataaccagatagtcgtaattcccagctgtttcaaccggggtaacatttggatgattccacgcaaatccccaatgccatcgttattagcatctttaaatgatgccggataaatttgataaaaaacttctttttgccaccaatttttttgcataattactactcctatatttggaatcgattccactttaatcaaaagaaaaaggcttaagcactttttcttttgattaagtctaagcttagatcaatcgctaactcaggtcgttgtaaccggcccaagtgatgtaatagctgatcgaccgccaattgagccattgccgcgaccggttgtcgaaccgttgttaatggaacttgggccaccgccgcaaatggttgatcgtcatatcctatcacggccatatcatctggcacgcgaaaatgttgttgctgtaactcatcaattaccccaacggccacctcatcagaatttgtaaacaccgctgtcgggcgatcactagggtttaaggacgctaattgcttccccaacgcttgtccatccgcaatcgtatgttgttgtgcgaaaacccagctattgtttacaactaactgctgctcttcacaaaaatctaaataggcttgcgtccgcgaacgtccatgatgcgtactgggaaaatcaccacccgtggcataggcaattcgccgatgaccttgatgatataagtatgccaaagcatctttagttgcctgataatgatttaaactgatcattggaataccaatatcagtagcttcttcattcaacagcaccatctgattagcatatgtcgccgacaattgtgccactagttgttgattttcaatggatgccagaatgacgccatccacttgttgctgcttgagtttatccagaaagtgttgttctgccaacgcatcatcatgagtctgcattaccatcacttgaaacccgtatccgtttaactcccgttccaatgcatcaaataactgtgcaaagaaggggttagagattcttgataccagtacaccaatcgtattagtgctctgcgcgcgtagctgactcgcaatggcattcggggtgtaatccagtttttcaatcgctgcctgaatttgcttcttcttagcaactgaaacactaggccgatggtttaaataccgtgaaacagtcccaacacctacaccagcctcagctgctatttcactaatcgttgtcatttaagctcgccccctatttggaatcgtttccataattaatataacgacctttcaagtaattgtcaagacaaattggtttttcaaaatgaattcactaaaaacgtttgcccttaaaacatttagtccaccagtaaaaaaatggaagtatcctgccatttcgataacttcatttttaacaatccagccaaaaaaatattccaagccagtgtacacctgacttggaatattttaattactgattcagccttagtaatcgctataacgatgcttgatagacatcaaaccacgtcaataatagcgacacaatcaagataccaagcatcgccaccgcgtgccaccatttatttcggacaaatatcgcaatatactcacgaatgatcgcatccggtaagaagaatcgcgccgtccgcgcaccaataccatccgcttttagacctgcttgcttggcaaacatcccggctctaaaggtatggtaattatttgtaacaaaaatcgtgcgtggatttttaacagggccctgtgcaatcaattgcttactaaactgcatattttgcaaggtcgtcttcgattgcgtctccgcccagccatccgttgcaggaaggccatgcgcaatggcgtattccagcatggcttggccttccggaaccgtttcatcaccaccctgaccacctgagaaaatcatcacggcccgatgatgcgtcttgcgttgttgcttctgataaaagcgcagtccacgcatgattcgttgccctagcaatggcgagacacggtctccatctaacaagccagccccaagcacaataatataatcttgtcgcagacggggccaattgaattgataaatcgtcagcatcgtcagatagttataaaaccaaaaaccaaggtaaaaaatgaccagattcggaaataccgtcaaaaaataactcacgggctgcggcacatgactactcaacagattgcctaaaaatggcaaaatcagaatggccagtcccaagtacaaggtcagcatattcgccaacgtatgactctcatgacgccacatgatccacgcattccataagagcaagaaggcttgtaagataaaaatcagcccaatcaacaggatcagcaacacaaacaacgtcccactgataatgatcaaccagtggatattgctacctaaaattgtaatcgccagcatggttaaaaacgaatagaaaaatagcgaaaaccaaataccgttacctaggcgaaccttatcgcgatgataacgccaaccaaaaatggttccaaatatgagtggtactaaccagccccagtaaaacattgctggaactggaacccaaaccgctgcgtcattcacatcaatacccccgcattaagttttatttcagcttccatcataaaggactccccgcgggactgcaatcaggagtcattacttcaactgtttttgttcattatagaaattacggtaagctaaatagcacgcaatgattgaccccaaactagtcgctgataagagcatgaacgtgaccataatttgatacttaatggcccgtactggatcgacccctgcaaagatcaaaccggacatcatccctggcagactgactagacccacagtctttgccgaatcaatggttggtgacatccccgtacgaatcgcctcacgcacgatggcaatcgaagcgtcgagtagaccagcccctaacgccaaccgttcaagcacaccttgccgctggtcatgaaactgactattgaggctgcgataagccagcccaattgcgaccattgaattcgacgcaatcataccagaaatgggaatcatttgcgatggcacaaacttaatcgcaccagatagcacgaggacgccgagtgttacccccgtactaacaaaaatggctaataacgaaatggctaatgcatggtcaatccccggcccccgttttttcgcattccaagccgcattgaagataatgaagcccatcatcgccaacgttagccacaaattgttgactcggaaaatatactttagcaagtaacccacgataaatagttgtacaacagcccgcacgacaccaatgacgatgtccttatccaagccaagtttctgccacaaactaattcctaacgcgacgagcactaacattgccgccaaaaatagcgacgtattattaactgctaaattcatgcatgtacctccaatctgccagcaaccactttcgctaattgatctgccgcagcaatctctgtcgcgtcatgagtaatcatgatcgttgtcacgtgatcctgctcatttaactgtcgtaaccaggcgtgcacgatttgcttattattttcatccaaaccagctgtcacctcatctaataacaacacttttggtaagaataagatgttgcgaatcagcgcgacccgctgccgttcaccaccggaaagctcggtaatcggctgatgcagggttcgttcggacagcccaacattatttaacgccgttaccactcgttgcgtatccatgacttgcttacgaatttggtacgggaaagctaagttatctgccaccgtctcaccaaatagcgtcggctgttggaaacaatatgagacttgccgccgatacatgattgggtcatagctttcaatcggctgcccatcaaaaatcaaggtcccacttgttttagaaatcatggccgcaatgatccgtaataacgtgcttttcccaccaccggatggtcccgtcaatgtaatatgagccccagctgaaatctgccaatcaacatcatgtaaaatatgttgatcagcgatttgataattaactttttctaaactaatcaatgaattcatatgcccacccccgattactaatttagaatcattataacctgactgttaggcgactttcaaacaatcctcctcagttatcctgtgtctttccacatgctataatggaggttaacacagttcacagaaaaacgaggtcaaaatcaaacttatgccacaatctaatcattattcgcaccaatcccgatcgcacaatgatcggcgccgacaacagccggatgaaaaagtgcaagcgaccgttaacatcggccagcgttttccactgaccattcggcgtttaggcattaacggtgaaggtattggctattacaaacacgtcatcaccttcgtcaagggcgcccttcctgaagaagtcgttgttgctgaagtaaccgccgtgcacccacgttacctagaagctaagattcgtagtattcgcaagcctagtcctgaccgggtcgatccccgcgatgcctatgcgggcgaagtcggtggttttgaattagaacacctcgactacccggcccaattagcctttaagcaagatttaattcgtcaagcactcgaaaaataccgcccagctggttatcgacactatgatgttcggcccaccattgggatgactaatccttatgaataccgcaacaaagcccaatttcaagtccgtttaattgatgggcacgtcgctgctggcttatataaagaaaatagtcatgacctagtcgacttaccgacctgttcggtgcaaatgccggcgacaatgacagtcatgcgtcaagtcgtggcttggctggaggaactccaagtaccgatttacgatgaagaacataattctggcatcgtcaagacaatcgttgtgcgtgaagcggccgccactggtgaaattcagctggtcttcatcacaaatacacccaagttaccgaaaaagcatcaattattgatgaaaatcgctgaaaaactgccaatggtcgtgtcggtcatgcaaaatatcaatgctggtaaaacttcattgatctggggtgaccaaacaacattactggccggcaaaccaactattacggaggagctagacggcctagtcttcgatttatctgctcgggccttcttccaattgaacccgcagcaaaccaagaaactctatcgcttagcacgcgaagctttgaacttagcgcctaatgagacgctggtcgacgcttattcgggcgtcggaacgattggtttatcactagccgacgtggctaaggaagttcggggaatggataccattccggcagccgttgcagatgccaatgccaacgcccaacgcaatcaaatcactaatgctcattacgaagttggtgaggcggaagtcttgttaccgcaatggttagcgagcggttttgcgcctgatgcaatggtcgttgatccaccccgtactggtttagataacgtcttaattgatgccatcttacaaagcgcaccggaaaaactcgtctacatttcatgtaacccatcgacgcttgctcaggatttacaagcacttacccgcggatatcaagtcgactatattcaatcgatcgacatgttcccacaaacagctcgttgcgaagccgtcgtccgcttcacgaagcgtcattaatttgccactcactgccaatcatatgagggggaatcatcatggcagctactgatagtcaaattgcattaacgatgacctttacgttacggccaccattcaagactcatttcttactattaaaagattacgtggcggatgttcgtatcccggctcgtgatgggatgctaacgacgattattgccaaaaacattccgctatcaccggccctagagcaactaaaaacgatttttgatgatgtccaaaacccagtttactggcgcttacacgaccaagccgttcaggaattcttcagtgcgcatcctgaacagcgaccggtcctaccaatcgacttgctgcaagtcatgctcaatacattatctgcccaaggtttgtccgatcaacaattaatgcacattatgaaagacgtttttgaacggctacaaaccaatgacttcaacggacaggcatcacagcgaattttgacgtcgttgaataataagtaaacgccaccatttatcgctgacttttataaattaggattagataacaccaagttgtctaatcctattttttcggacataaatcaatagcggtgaaacttcattagtcacagaaattcgcactaatactcgtttttatttttcttagccattcattaaatgtcagcatacgaaaattgtcttttcggttattggaagcaaacttgttgactttgaagttacatgtgataagctaatcactgtaatttttattgctacagcaatttgaaaggatgtttaattatgaaatacgccgtcactgccgctaccggtaaatttggtcaaagcgccgttagtacgctgaatgctaaagttggtgcagaaaatgttttagtaattgctcgtaatcaggacaaagctgctcagctgtttcctgataatccaattcgtatcgggaattacgatgatgtcgactcaatgacgaaagcctttgagaacgttgaacgcgtgctcttcgtttcatcacaacctggtggtcccgttgaccgggccaccgctcataaaaacgtcgtgactgcccttaacgccgctcatgttaaatttgtcgcctacactagttttcccaacgcacaggcagcagtcagcgccttagccaatgatcatcgggccaccgaaaatgccataaaagcgactaatattgcgcacagttttcttcgtaacaactggtatttagaaaacgaaatgggcttcttacaaagtggtgcccataaccaagaaaccttgtactgggctaataatacagctggctgggccttggaacgtgaatatgccgaagcggcagcaaccgttttgatgacagatgcccctcaagaagtgtatgaatttgctgggacacccctcacttatgccgcactcggtcaagcactccaagaagcaactggcaaccaagttaagattacccaagtcagtcaggatgcgtacgtgcaattccttgaaacgactggtctaaatcatgataccgctgctttgtttgcctcattccaatccccaatcaatgatggtgcgctggctgaaaagtcagccgacttagctcatgtcttgggacgtcaaccattggaagccagtgtagctattaaagaaatcttagcgcgctaataactagctagctgtaggtttctcttaaatatcttctacaatacgaaaataggaagttcaacgaacatggcgttgagcttcctattttttaatgattcgtaaatggccttttcattagcgcgtaacatcagcaaaatactgagctaaggttagctgaataccattatgattattatcagttgttactatgttcgctgcctctttaacgggttgtggcgcattagccatcgcaacaccaatccccgctgtctggagcatcgcaacatcattaaagttatcgccaaacgcaagcgtttcagcaggggtaacttgatcatcctgtaataatttcattaatgcggctgctttagttacgcctgccgcaacgatttctaaataagtttctttcgaacgataaactgctaagccgctaaattcattacggcttaatcgttgttcaatcgcctgaataatatctggatcggccatgatcatcattttatgcactggcgtcggcatccgttgcaaccatgtgcccaaatccgtgacatggggtgcataaccaattcccgtcgcttcctgctgttcccacgggccattagtagccaccaaccagttattattcgaataaatactaattgaggcagctggccaatcatgagctactaccgtttgcacagcttgtgctagtttagggtcaacggcttgctcttcaaaaacagttagtcgatcattcacatcggtcgtagccgttagcgcgccattataggcaatcatggtcgaattaattcctagttgttgtgcaattccaaacatccccttaggcgaacgtgctgaggccaacaccatttgtgccccccgtgcaaccgctgcttgaactcccgtaattgtagccggtaataactgtccttgactgtcgactagggtaccgtcgatatcacttacgattaatttgatcattgattttcctccgttaagttaatcatggctatgctaagcgtagacttatattatgtatccttatagattctactgtagcatgaatcaagtcataaataagtattccagaccatttttcattcatagtaaagtaaaagaaccgataacgttacttgttatcgactctttttacctaaaatatcaaatttttggccagggcgacattaccaatcgttgcagaaccattattagcaattcccgttaaaacaatcaaatgatctaagttcggtaattcaacataattgttattaagctgctcaacgtctcttctaatcactggaagttcagtttcgcttactactgagccaccaataacaattctttcaggcatgaaattaagatatgcatcaaagaccagctgtgcaatataataactgatcaacttaaatacttcattggttcgcttcaattgttcccccggtttgccagttcgagcctcaattgcgggtcctgaagccatgccttcaaagcaccgattttgatgatatggacagacacccttgaagttatcgcctgacataggtatgaccattgtatgtcccatttcaagatgagacataccacctatgaaatgattatcttggataacaccaccaccaatgcctgtcccaatagtaaagtatactagtgaacgcactgcttgtccttgtccaatcatatattcaccataagccgaagcatttacgtccgttgtaaaagtaattggaattttcaaagctgccctcaacatctgtacaacatccgtatgagaccaaccagcttttggtgtatttaaaatctgaccatatgtcggtgaatccaccttaatatcggctgggccgaaactcccgattcccaacgcatcgactggatttttcttaaaaaatgaaacacaggcttccagcgtttcatttggctttgtggtcgctactcgttgtcgcttcaagatacggtagtgctcatcagtaattgctaaaatgaacttagtccctccagcttcaatacttcccaaacgcatgagctatgccccctgattgtgtatgagcaaggtaaccatatcataaggctgaatcattaattgttccgaacatggttgagcctcttccagagcatttacctgaatgaaatgttgttttaataagggggtcaaatcagcagccacaccagattcatttgccaaacggataacaaaactatttggcacagtataggccggatacaacgcgctaattgtgacatgtggatcgagtttcaaaaatgactcgcactctgagatagttggtaatgaatcatcaaattcaacatcccaaattttattgtctaatcgatttacaaataaattcaatttttgtaattgataactaacatcgggtgctaaccacttttcagcaattattgccaatttattttcattcaattgagacgtggaaactaacccaaactcaaatgtatttgctcctaattcttcggccaacggcgttggtgtcatctgatgcccaatactagttgtatcgcctgaagcacgacctggtcgccacagtaaattaggcttaccaagttgaccagtggttgccattaatgtgacataaaatgctttctttcctaactcgtattccttcattcctttagcaattaaatacaggccatcgctagccccttgcatcccgacaattttatcaaagttataaaggttaaccggtttttcaacaaattcttcttcccaattttccgcaattggtaaattacgtgttctttgaaagccgccttgaacttgcgcaactgcagtgtcactttcaattgctgtattaatttttaaccgtaatcgatgatctagaacctgattatcgacagttaaacgacctgccaatacattgtcaccatcagttaaagtcaacgttaattcaaatgcgacatcgtgcagctttggttcgtgactaatcctgtcagccaagccttctggtaactgccacttgccgcttaatcgcagttcttgccttccagctccaacataaatggctacaacgccggctaaaggcaagtcaacctctttgtcgcctcgaagcggtgaataatcgtacgtatcaccatcattacccgaatctacaatactaatgatgtttttgtaagttttcccattagtagttgcctgaaagttgccatcgacataattcactttccaactttcattttggatagccgtttgttgctcagactgtaattctggcaaagcttctgcaccatccttaaagtcaattacttggtaacccaacccatcaaactggactgcaacttgtacttgtaattcatagtaaccaggctcgtctttaaattcaaagcctttagccgtttgttgcatgatattttctcgcttagccacataatttgcacttaaaatagttgcttgatatttttcatcaaacataatgtttttcgatgatgttaagaaacggattttcttatatccattgaatgggcgtggatcagtattgaatacaagcacctgattggcatccagtttcaaccgttgtgcgattcttttcttgatatagttttcgataccgtctgcaatttcaaaaccttgtttgaatcgatggtcaatatcaatagcaacattatcagaaacactgccacccaaactgtcatgcggttgacattctagcaactttttccaaagtttcaaaataagacccttagacacatcgataccacatcttttggcgatgaccatcagtggctcaacacgtcgtaatatttgctgttcgagtttgaaattctgccgtttaatgcgcgaacgtactgaaccaattgtccgatgaactctagcataagttggataccgcaactcgccttgataatccggtaaatcgttgcgttgtcgtaatgttcgcataaacttcggataattgctgatcacaatctgattatgactatatttatttatcttactaatagtctcagatacgttatgaataatattcatttgatcgattcccgaaggcactaggaccgaattattttgaccctgttgactttcaaaatcaattcctggatctagacggtttgcaacgaactcttgtaagtttttcttcgaatccaatgcgatttgaccagtatagtaacctaacggaaaattagcagcatagacttgactatgacctagactgtgccatttaaaataaacagagtccatttgtcgcttaaaattagtgccccgccaaaaaataaagtcattaatgccaacttgatttaagagcattggcaattgcgaattaaatccaaaagtatctggcaaatagccaatcatcattggttgcccatacttttgtttggtatcgttgatgccaataactaagttacgaataattgattctgcatcaggtatcatcgcatcagtctgtgtataccatggtccaacaaataattgattacggttaattaatttctttatccggataacatcttcgggatgcatttcaacatactcatctagtattgatgtctgtccgtctaaagtaaaattagcttcaggatgcgtttctaactccttcaaaacatttgagaacagctgatcacttagcacctgtgcgtcctcagttgtaaaataccattctcgatcccaatgagtatgatttacaaaatgtgcttttgtcataaatgtatcgctccctgttattttaggtaacaaaagccgcattacggctctttaaccattatgcggctcgttttagtcaatctaagcttcaaaattaatgttaatgtcgtcctcattatcatcagtgacttgttcttcgctctgtgtttggttaaagtccacagccaatggtgccagtacaccgataatcgcagcgcaaacaattagaccgattaaataggcccaaccattcgtaatggtgacaaatccataaaccccaccaacaggaggaatcttagcctgagccccaagtaaaatcgtagtcgccgaaccagcagcaccagcaatcatattaattggaattaatttcaacgggttaactaatgtaaacggaatagcaccttctgttattccaataaatcccatgaaccagtcgcttcgtccagcatcaagtaattcatcagaaaaacgatgcttaaagaaagtcgtcgcaaatgcatatcctaagggaataccagcaatagccacattaacgatcattgcaggggtgtaaatcttttcagctaataaaacgtttcctgccatccatgcagccttattaacaggaccgcctaagtcagaaccaatcatagcgcccatgataactgctaaggtaatagcacttacaccgcttgtactcatttgtttaatccaggcgacaagtgatacattaatccaagtcagcggttgcttcaaaatgactcccatcaatattgccacaaccattgtagatagcagcggtacaacaactaatggcataatagattcgaacttttcaccaacatgtaacttattgtgacaccaacgtgcagtataaccagctgcaaacccagcaaccaaggctcctaaaaatcccatattagaactagatgctaatgagcccccaatgaacccggcggctaaagctggcttatcgccaatagcatatgcaatgtaaccggccaaaactaaattaactaagccaacaccaatccaaccaacggcttcaatttgtcccatataaaaccaaaaaccagttttatacgcatcaaaacttgtaattccaaaacatagacctatcaacttaggaactgcaactacgagggacccgccaataacaaccggtaacatatatgaaataccagacattaagtagcccttccactcagccaatattttcttcataactcactcctccattcttcattaagttcattttatttaacacgagcagcaaccgctttgctgaccttatcaataacagctttcggctttttaatacacatattaatatcaactcgaactgctggaatcccttcaaatcgatccatcttttcaattttttgatccgaaccaatcaataaaaactttgcgcttttcgcctcttcaactgtaatttcatttttaagtcccattgcaccctgttgttctactttagcttgtaaacctagttcctgcgctgctttttctagcgctttcgccgccattggtgtatgtgctaaccctgctgggcatgatgtaattgcaacaaaatccatatcagtcatcctctttttataaaattttttccgaactattggttaatacagtgtaaacatcctgaactgtttgactttcaagtaatgcttgacgctcacggtcatccactaatgcactcgcaaagttagctagaatctgtaagtgtgcctgctcactattttttggaactagcatagcaattacctgattaactggttggtcatcaaatgtcggccaatcttgaatgcttgttgtagagcgaatgaatagtacagcaggttgccgcagatattctgagattgcatgaggaatcgctataccgtcctgcattcctgttgaagcttctttttctcgttgatacagcgctttcaaaactgcatcttcgttatctgcaaagccaagttcaattgctttatgtgcaataaagctaaaaacatcctcacgtgttctaaaatgttcttttaaaaaaatatacttctgtttaaaaatttctgtcatatttgcatttccccttcactgctgtgctaatgtatcaataatttcttgagcattttgagcctttattaaggccgtcattcgctgcccatcttgaatcaaattatagaaataactgtaaatatcatccatttgtgtttcaaccgtgcgattcagggctacgaaaaatacaatatggacattttcgtgatcccatttaattccctttttcgacgtcatgattccaatcgttggttgcaaaacatggtcgatatcaccatggggaattgcaaatttatcgataatggtggatgcaacttgttcacgtgctaacgctgaattttgcatttgattatcaacatacccatacttttctagccgatcagttagttgaataatcgccatctttttttcagttgcctttgaatttgtaataataccgtttggacttaataatttaacaaatgcgttccgcgtatacttttcttgacgaatatcttgacttaacttttccaataagctgagttcttggtcattcaaaaacggactgacttgaataaccctcgtaccgctcatctttaacgggatagtcgaaataataatgtctgcagtcactgttgaagtcatcaactcattcacagacaaagtgccaacaatctgaacatccggtagtttgtccatgacacgttgctttagtaactccgccgtaccataaccagtgctacatacaattgcaagctcaacatctggttttaagacctttcggcgctcaatgaacgattcaaagtgcagtgctaagtatgcaatttcatcctcagttagctgtaaatggtattgcttttcaatcgccatcgctaatgctagtgcttgatcaaaagcgacgggaaaatacgttttaacttgattacaatacggattcgtaatactaatgccatttttaatgcgaaccagcgccggacgtaagtgtagcgttagattacgtaataactgattatcataatccgttagcacgctacgtagccagtcgactatcgttcgttcaactaagccgcttctatccagatcaatgtacccatcctcaatggccgcgacatgcatatttaaataagcaatttcttcatcgggaatttcacacttaaaggccacgataagcattttaactaatttgttggtactcggagatattgccatagtgtcaaaattctgtgtcgtcgtttgagtaataaactcgccattcttaattcgctgaatcgcaatagttgtatggatcagtaaagactcatattgatattcatttacatcaacttttaaaatcttcacaaatttattcaggactttttgcatctgatttaaggtttgtttattgacatatcgtttcagggactgcggcactttaaatgtgcgtgtcattttgccagtctgttgattttgcttaatctcttgtccccaatatgactgtaatagctgaccaatcactcgacgaacatcactctccgaactattgaatttaacaccttctgtagtggccgtcagcttcaacccataatccatttttaaaacatttaaatcacgttccaacgtactacgactaataaagaagtggtcagcaatatcatctaataacactggtttagattgctgtgtcaagaatgtcataatgctaattctgcgttcttgctcactttggctattatccttcagtatcggaaactcagccaacagtcccttcgtattaccactaaaacgaataccctgtcctcttttcctaacaaggtgtacaccttgttggttgactaccttttccacctcattcagatacttagcaatcgtcttacgagatgtgcccgtatactccataatatcttgatagtgaactatcctttttgacaatatcaactcaataatcattcgtgtaagagttgctggtgaactattcggcgccaaatttatcactccctaacttttacaattcatatgataatgtaaccgtatacattatttaagctcataaaagtacacttgtagctagtgtacctttcataagttattattctttgtgctgtcggccatatacttgaagattgctttagaagtttaatctcgaatcctattgtgactaatattaccccgattttgcgcgttatcttacaggaagacaaatcatttactgaattaattaactattgatatcaatcataaaaaagcagcgtgatttcattatcctgaaatcacgctgctaagactatccaattacaatattcctcagaacagtctagtattaactctcattatcaaatggtgcctaactatctggtctcgaattatccttcaattcaaacttaactttatcccccacgagtttgacaaatagttcctggtcaggctgaggatcaaatggccccaagtcgacaagaatctgaccattatccgccacttcatatccttggtaacgatcggcaagcagatgatagattgtttgggctggtcgcatccgctcatccacctgagcggccgccgccttcaaggtataaccagtctgcaataaattactcatcgcggctgccttgataaccattttcattgtatacacgcgagcctggcccggctcatcctcgttcttaggaataatgtacccctttttttgccaataccgtagttgtcgtggcgagacaccagtcattctgcttagttcactaatgccaatagttaattgtcctttatgaaaaagctcacgtaaatctgcacgcgtcccgttagtcatactggcgactcctttccaaagttgctattgatataaattatagcatggaatttcgtcgcgaccattaactcgcttggaattttccgtgattaattaacttttctgataatttgtttgtaagtaatccagcaatgactgggcgggacgatccataatcagctgataatcatcacttactgtggctaatagtccgcgggcgccaccggcatacatcgaggccaacattggcccctcaccattctgattgtacatatcgctgaaggcttgcaaggacactggtcgatacccgattggttgcccgctcacctgactaagcacagtagcgagttccggcatcgtgtaagctcgggactgtgttaacgtatagattcgaccacgttgtaataaatcaggcgttgtggcgactttagcaaaagcggccgcactatctgcctgactgatgaagctgagagcctgatcagccattggataaacgacgttgtgccgttcaattaattctggcaaatatggcactaacggatccgcgtaaagcgcattccggacaatcgtatagttaatatcacttccagctaatcgccggggcacgtaaccataaaatgctgataattcaaatggattattcacctgatcggcaatgaaacccatgactaggaaatgatgcacattcgcctgttggactgctgctaagacgttctcaaattcttggacccgcgaataactatcatgactcttactaggaatatagatcaggacatcactgtcttggaaaaatgcgcgtaactgctctggctgctggtaatcaatagccgcaacatgcaaaccttgttgttggtatacctgggccttactgagtgtatggacccctaaatataattcagtggtggcgactaacggtctcatcgcggcaacaatctgttgtcctaaatgaccagtggcacctgtaatcgcatatttcaatttaactcgccctttcatgtaactttattagttacatttaactaaatatcgatatatttgtcaaataaagcggccgcttatgatattaacgtcacccattgccgccattaattcggaaacatttcgtcgctacatcgttaaaattaaatacacagaaagggctaccctcattacaagagcagccctaagaaatgcttttctaaaaatagttaagccctaatttgcaacctgttgaccaaggtgcttcttttcaggcgccttcttaacgtttttgacatcattatcggaaaagccaaacatccacgttaacgtaaaggcgacaatcaagtcgatagcagaggcaatcaagaaaccgtagaaactaaaatcaagccccttaggattgatgaaggaggtcacaccgatcaatgatccggcgaagccccacatgttaacgttaaacagtccggtcaagaaaccgccgacagcaccaccgatacttgcagtaataaatgcccggccgtatttcagattgatcccgtacattgcaggttcagtgaccccacagaaggctgagatcgttgctggccaagcgagctctttaatattagcaaacttagacttcagcgcaattgctaagaccgcgccaccttgggcaaccatcgttgcagaaacaatggcattcaagtaactgtgcccagttgtcgtaatatcgttgacaacaattggaataatcgcccagtgtaacccgaagataactaatacttggtagaagccaccgataattaagccagagatggctggactgagtttgtaaatcgccacaattcctgcagccaatgcgccagacaaagctgtaatgattggcccgaggatgataatgatggctccagaaataatcacaacttcaaacaacggtacgaagatcatccgtaagactgttgggatgacccgcttgagccatggttccaacttacttgctaaccacgcccccgcaatcatcgggaaaatcgagtaggtataggaggcaacgtgaaccggaatgccaaagaagttcgcattgattgccattcccaataagtgacccgtaacctttccggttgttgccatactaacaattgctgggtatgttaagaccccaccaataattcccatgataaccggatcagcccctaacttcttggctgcggtgaaaccaacaaatatcggtaagaagtagaagacggaatcacccatcgcattaataatcacgtaggtcggcgttgtcgcagagacgaggttgaagttctttagtaacgacaaaatcccctttaagatcccagaagctgccaacaacccaatcactggaatcatggatcccgtaataataccaatcaagctgctaaaaccgtgtttgaccttctgccacggcgtcattttctgccacgctacccggttcgcttccttctccatcgcaacagccgaagcgtcagcatccccaaagcctgcgcctagttgacccacgattgcatcatacacgtcggtcaccgctggcccaatcaccacctggtactgaccacctgcctttgcaacatcgataacgccctttaggtttcggattacctcgtcattggcctgcccttcgtcctttaagtaaaatcgaacccgggtaatgcagtgaatcacgcttttcacatttaccggtccaccaacttgagcaatgatttgagtcgccaattcatcgtacttgccgcccttacccttaaccaccgatgcttcggcaacgtgttctttcaattcaacaacagcaccgacgaccccggcacggacttcacccagttcgggcgttagtttggtaaccatatccgccgtattcgttacggccatgattaccgtggtatccttgttcgcactagtaatcgccgctaaatccatcacggccactttttcgccggcctcgaccgtatcaccaacttgcacgttaactttaaacggtggccgatctgctagttcgaccgtatcgataccaagatgaaccaacacttccagaccattgttccccgtaaagccaatcgcgtgcagactcgctgcaaccatcgttactttaccactgattggtgcaacgacctgtccatctgtcggttcaataccaaatccttgccccatcatcccttgtgaaaacaccggatcgtgaaccgattcgagtggcactaactgtcctgcaactggcgttaataaatgcacttgcttcatagcgattctccccctttgactaatcaataatcgcgttgttaacaaactaatttcggacactggttgttataaaatcactaataattgccaatccatccagtgaccaactgtcaggccctcctaactaatcaagtaacgcccttaaccataaaagcgctttcttttataaacataataatagccgcccctattaagtcggtcaataaaacccgattaaattaaggcggttcacttgaatttaggaacttatttaattagtttgccaaactttgtgaagcaagtgttaatctttgcgttgcaagaaaggaccgttcgaaatcagccgtcgttttgacctgtttaccgaaatcaacaatcagtgcgtgccactcccaagccgtcgttaaatcataatgccacgcctgcataatcagttgttgggcctttaagtagttgctcggtaacggttggttaagccagccgaataggcgccgcaaatacgtgtcaataatgatcgttggctgatgaaaaacgtacatgctaaagtagtcagccgtttcatcgccaataccgcgcagggcgattagttcacgccgcaattgttctgctggcaaggctcgcatcacggtcaagtcaaaatcatactgtccacaccacgctgctaaggcttttaaagttggaactttgcgcgtatagaagcccgcaggtttgactaaagtcgtcagttcagtatcagtcaatgctagtaactgccgaggctcaaagtcagtggctgcttttaaattagccagtgcgtaatccacgttgcgccagttggtattctgaacgagaataccgccccagagaatctcccaaggcgtctcggcaggtgggattccggcttggagccagtgccggggccccatggcagctaacatctgctgatacagtgtctcaatggtcattgttagccctcctcacatgaattgattaatgttgagaccaataatttgatcttacaaaaaaatagtcgtaacggcaaaacatcaatccgctacaactattgtttacgcttgtttattagtcatctaccaccgtactgcgcttaacagctagcacaatgtcagccttccgattttcaggcttgatcttttcttcaaagtccaattcggcatccttaaacaggttctgaatctcagtattaactaacgacaagtcgcgtgaatccccagcttgttggcgaatatagaccacatattgatctggtaattcttcaagatcatattccacatcttcgtcattcaaaataacataaatcaacttacgttctttgttcatttgaaacttccccttatcaattattttatccgaattagtcgtttgcggctaactggtgagcaaacttaaggtagtcagccacacaatggtctaaccactcaacgaccttattgtccgtaaggtccccatcggcattcatcttgtcctgcaccgcgctcaacaagaattcatttccaggcagaatctgcatcccaactccgggtgaatctaaaacttgccgtaaatgactctgcgctcgcactgtccccaagggtcccattgtggcccctaaaatcatagctggtttcccaattaacggtcgttcaacacgcgatagccaatcaatcgcattttccaagacacctggaacactatggttatattccggtgtcacaaaaatgacgccatccgcgtccatgaccgtctgcttaaaggcttgcacctccgcgggggcttctagctcgatatcctgatcataaaaaggcaacgcgcccaagttaggaatcgtgacatccagttgatcggcataccgtttctgaacaaacgttgctaacttacgattatatgaggaacgtcgaatgctaccgacgagtgcgataatcttcatcgtgtgaaaaactcctttaagttgtaattacttttagtataccccttttttggcaaatagtcggaaccggttacaaaaaaccagctgctttcatcaaaattttaatcttaactgctgaatattcagtcagtttagcaattccagtcccccatccgcgtaactgccattatcttaagtctaattttaaacgaggtgagacattcattagcgggcctgattattgcttgctcatcgaaataactaccagacataataatcgaggcagtgctttatcgccatcacaggattaataaactttcacaaatgtttcttaacttttttcaaaaccaaacgtccattgttagtgtgatgaatagagtctgctatactattgattagagaaattgattggggggttaatcgtgtattatcgtggtgaagcacttgactttttgaatatgctacatactacaggtgccgcgccattaatgcgttcgcgaatcgttttttccagtcagatcgacgtggaacgcttaaaggctgccgtgctcgcttccgcacaaatcgtacccgagattttcggtcattatcaagctgaccgtaatcgtttcgttgttactgatcaaccagtcaaccaagttattcaggaagttcaaagcccgtatagtcctgaaaacactgattttgattttacgaatagtccgcaactacggttatttgtcattcatcacggtgactacgatgtcttacaagcctttatgagccacctaataacggacaatcgtgggtttaaagaatatctgtacctgctcgcacaagcctacaattatgccgatctcacgaatttgcataatgaacggcgactacgcccagttatcactaagttgcaacgtcaatttgcacggccacacggtcatgcacccattgttaccggtatggttaaactaccccattatccgggaattaacttgcggcacggtggtcacgtaatgctcagtagcacgcaattcatgcgcgtccgacgaatggctaaggcccaagacgtcggtattagcgaggccattttggcggcatacgctaaagcactccaagttttaactggtcatacaaccgtgacattgccgtgcccaatcgacctgcgccgcttcacgactgaagatgcgaacgtcacccaaatcgctaatttaaccgtcaatgtttttctgacaatcaaggtagatattgatgcaccttttagtgagctcgtcaatcaagtccacgacttgttaacggtcgagcgtacgcgggtcgccttcctttatcgacttagcaatttacagaaaatgaaccatacaatgccaatcacggtcatgcgtaaaatgaccaaacgctggttaccacagcctgcgctccggtataccaactttggtgtcgtcgaccaggaacggcttaaatttcatgacttgacggtcgtcaattgcgtcttctcgggtgccttccagtgctcacccgttatggaaattgccgccagcacgtttgccggaacctgtacattgagcttcaatagcaccgggtccgaacgtgactaccagttatccatgaaaatcctggaaaacatgcaagctcaactgctagtgtgggcacaagcagatgctcaagtagccacaactgataatgtgacgttgcgccaccaagcataattaagtcaattgataggccttaaataccggccacaaaaaatcccaagctaaatgagcttgggattttttatggccgccgttaatctggctatcagtgtgattatggattatttagaatcatccagctaatgacgactagtcatccggccgaatcgtttccgagtaatgacttaactggtatatcggtgcccgtcgtgccaatattgctggtgctttgtgaattttcactaggcaaccagtttgcccacttggggtcagtcgaacatcataattttgaaaactagggcgtattggcgtagtcactgtcagtggtccaataacgcgctgtaagccaatctgaatatttgctaggtgttggaaagggctcccaactaaattacttaaaaagccatcatataggcgccatagtgccccggcggacggcacccagactggttgtccagcggatgcttgtaattggaatcgtaacgtcacgcactgccgggtcacggtcaactgaatcggtcgaaccttcaaccgagtagtagcggcttttaggactgcaacttgtgccaacgcttggggaacatcatagctcgccgcaaatactgggaactgattagtgggtacctgccgtcctttttccgtagtcgtaagttgccggataactttcatcattgcttcaaggccaagtacatatgcgcgttcgtattggacccgctcaaccggtaatgctggtacaattaattgcgtcattttaccacctctatccacattcacttaattatcgttagtttactcacggcctcagccccagtaaagccttttcagctatttcgttaattaattttgtcaaaagtttcatctagtaatgtttctaaattggaatccttctaaaaagtgtggtttaataagggtgaatatgataaaaggaggaaccgcgtcgtggcagaagatatgttgatccaagccttgcagcaattaaaggaccataaaatccgtgtaacgccgcaacggcaaatcattcttaattatttgattactcaccataatcatccatccgtcgaaaccatctatcaggaattagcaactcaattacctaacctgagcttggcaacggtttacaatacgttaaaactttttgtcgacttaggaatcgtaattgaattacaaaatggcgatgctggcacccactatgactttttcggacgaccacattatcacgtcgtttgtgagaattgtggtaaaattactgacgttttcgagcccgacctccgcagtgtcgaagccaaggcggcggaactctctgggtacttggttacgggtcacaatatggaagtctatggattatgcccagactgccagaaactactcaatgtaactaaaacagctgatttaaagcgattgaaattgacgcacagtgaatagaaccagttcaatggcaaccggctatttagcgcgctggttatcctaaaacaaaaggaacactttcagttttcctgtattagtccctgtcaaccttaagcggactatcacagcctgaagtgttccttttaatttatacgataagctgattttacttacgctttaatcagcatcacaatcggaggacgctttcggaataccaatcagcaattacacgaccggtagccctcaaccccctggccggtattaatgttgtgggacttcttccagcatgccatagaactgtgacttgtcagagaaatcagccatataggccccgttcaatccggccttttgcccgattattcctaagtcgatcattagcttttcttcttcatctggaaagtgtaaccgtcccttaatggctacactacgaatatagtttactaggcgattgactaaggcttctgggttcttagtcgtagtaatttttttatcgacctgcattaatacatcaataatatccaataagtcccccgactgatcagaccacccacttaaccggacgattagtcccttaatagcctcttgagcttgttgtcgtaattctgattctcgctgcattaataaagtccccctctatatgattcggattaccataataatttcaaattataggtatctttatatacacttttattatacacgcttatgattgcattcaaaaaaacattcataaacgtgcaaaaaacgcccatcaacgtaaaaaagtccgagctttcacccgaacttaaccccactttaatttactaattaccctaacgttcctgtccaaacgcaaaatagagccacggtccaaatggttgtacaaaggctaataacaaccagccaagtcgatgtcctcggcgaaatgacttcgccgtcaagacatccgcaaccacaattgtggttgcggtaatctccatggcggcaacgggtaacaaccgttgctttaatttacgtttgatccgtggtggcatttgattgtgatgacgaaatagtcccatattgacgcctcccttaattattaccaacattataccttgttaattaagaaagcgctatcttgattcatacccttgtggggctcgcccgacaaacttagtgtctgggatcgtcaattcatcaataaccgctttcccatgcagtaactggcgcgttgtcacaccgacctgtcctcgatcgattgtaatgatttggtaactactgccctcatgaacataatgatgatgtggatcatggcaatcgatcgcataggccgcagaaccggccaccacattcagaatattatctccaatcaaataacttgaaacaaagtgaacgtgaccagagaatacgccgcctaaattatgtccccgaagcaccgataacagcgccggcgtattttgtaaaatcgcatagtgcatatttgtcatcgtcggcccatctagggggtgatgcaaaaatagaaaagcccgctttgtcggtgcctgtcgtagatgttttcccaaccattgtagctgttgtggtgccaaccagcctgcctcataaccgctaacctttgaatccaaaaaataaaagtcgttgttgccaatccgcatgcgactcgcgtagtatggtcccgggtcagccggcaaatacccttcgtaaaacgccgctcgccgatcatggtttccaaggataactcgaacatgacaatcaaattcagcttccatcgtatggatgattgcgtgcagccgctgataattgtcagcgctaccgtcatgaatcaagtccccggtaaaaacaatcaaatctggcatggttggtaatcgccgaatatcatcaataatattggcaagcttgccccagggatcgtactgctgaccatgtgccggtacttggccgcggggggttaaatgtagatcagaaatctgaataacttgtaaaggacgcaattcgatcctccctctcatactttaatcaccagatggttatctctaatatagcgagctaacgtaaagttttaccaatcttcatataaagtaactgtaaagtttgtgctaacctctctttacgcaccattgaaaagtgcccccacagcaacacctttcaccaatagttcagccatcacccgtattgccctcattatactgaaaccacattatcggcagcacgtgcccaacggctttactgtaagtcttcagtatatccgcatcttatttcgccgtcccccagagctagttgttcttgacatcagcacttggcacatgccacccgtgtttcatactgagctagctagtctgacgcgtaatctcataatttttggttgacaagcccaccttttgccgccaccatgaagataagctttaataacatcatacgagtgagggattattttgaaaaatatgtttgtcgggccccatgtggcccttgctgttccccagccagaagattttgatgagatcagtgactggtacactgacgccgattttgttcgtaaaatggatacggctgccgcccgaccactgaccggtgaagaactcgaacgaacttaccgtaaccttgatcggaataccgaatactactttcacgttcatagtttagaagacgaccacttattaggctttgtcaccctattcaatatcgaatggcataaccaggttgcccaattagccatcgcaatcggtgatcccgacgaacgcggccatggttatggtaccgagacactcagcttgattttgaactacgcttttaacgaattgaatctttacaaagtctgtttggacgtcatcgcaacaaaccccgccgctatcgctgtttaccagaatagtggttttgaatttgagggcaccaataagcgtgctatcaagcgtgatgggcaacgaatcgacctctatcacatgggcttatttgcggctgatttccagccccgcgttactttaaactaattaatcagctcaattagttgcagccaataacttttgcaattataatagtcgcagattgatagaaagtgaccaactgactgtcaatccttaatattctttagttttttcgattattagtgcgttgctgccataatgcagctaataatcactttcattcatagactcccccaagtctgatgaatggggttcatcaaagcccccactttgatgtttcctactccttgaccactacatccgctgatgtggtggcttttttattgccgtctaaaaaagccgtcatgggtatgcaatccccacaacggcctgctattatcttgtaatagccaaaacaagcggttcaacaactgcctgtttcgattagatccaactggtacccaatctactcacgagtaaattatgtgccaccaagatttaatcttcttccaactcaacattgctgttcgttcgacgagcaatgaaccattccttgacttgaattaaaacccacgcgattcccgctgtaaaaagcaacaacattagtgtcgaaacaataatgacgatcacaatctgaacgccttctgcctttaacacgtctaacttagttactaacgcgatccctgatggaatgaaaatcaagctgataaattggacgaaaaagttgctaacacccgccacctgctcaagtttgaccactttaaacgttaacagcaagtatagtagaatcatcccaatcaacggtgtcggcattgggaatgcgggccaaatcttattgactaaattagcaattaaactactagccaataaaatcaaaccataaatcacaatttgtgtaataaacgcgccttttttcatcgaatccctcccggaccatctaacctaaaccaatcaactgcgcaaaccctggaaccataaaattaacaagaataccggcaatcacaaaggcgattgcaccagttgcgcccgcagcctcgctcacttcaatcgctttagtggcaccaaccgcattaccggcaattccgaatcctaacccggcaccgagcggattcttgtgcaatttgaaccagcgaataaaatggtcgcctaacgcgtaaatcaaaactgaattcagaatgactgcgaacgccgcaatggcttgatcgccacccaccgactcagccaccggtaaagcaattgctgtcgttgctgcttgtactaacatggcacctaacgctgcatccgtcagaccgagcaaccgtgaaatcccatagataccaaataatgacagccctaacccaatcgctaacgcaatcacaatgacatcccaatgtttcttaaagatatcattacgcttatatagtggcaccgcaaacgagacggtggcgggcgccacaaaccagaataaccagtcgccaccaacctggtacgcttcataaactttttgcacgggtgcctttagaatcgacgcaatcaataccaataaaccaatcccgagcagcattccaaaaaataacggttggaataacacaaagcgatttgttttgtgatataaatactcgccaatcccatacaccaagatcgacagtccgatcccgaaaaacggattattgagaagatagctcacataagttcctactttcttttagtgaaaagagtgacaaaaaaggtgccccatccgggtctagtcatcattaaatggtggttaggctcagaacagtgcaccaacacggttctcatttatcattaattaattataacacatcaaagtaatttttaatagtaggttagttcgtcaaatttaatcaactgtataaaacatcaatgcgtaagcgccaacaccggtgtgcgtcgcaataattggactagtacgcgcaaccagtggcgttacttgtggaacgacttgttggagaagcttttctggcgcttccgcaacgctcggttcgccgacgtaagaaattccagccgcttcgactcgagtcgcatccgctaattggtctagaatttgttcctgcgctttgattagcgcctttttcccgcgcccccgcgtataaagttttaattttccggcttctaattcaaagacaaattttaatttaatcaaattcgtgaccatgccagccaacttagggacgcgcccacctttgaccaaattgtcgagcgtatccacgaacaagtaggtcttagtatgctgccgaatgacggttatcttcgccaaaattgtggccatatccgcaccggcgtgagccatccgtgctgctgtaagcacttgaaaggccatcccacggtcagccgcctgggtatcaataactgtcacatcgccactagcaagtttggcagcttggcgagcagcattgaccgtcccactcaatgtctccgtcaaatgtagtgataatacttggctaccatccgctgtcaattcatcgtagcaactgacgaaatcaccaattggcggctggctagtcgttggcaagactgggctgactgccatctgttggtcaaattccgcggtactaactgccgtatctgcaatcaagtcgccaccgaaccccacgagtaacggaaccactttaatattatactgtgcaatctcggccgtcgttaattggaccgacgaatcggtgacgattttaattgtcatatttggaaaacacctttcgattaatttgtgcttcattatagcacctcagagtctaggaccaataaaaactgcgtcacaccagcatttagccactcatattgatttatgacggtcatcatttcgttataaactttgtaaaaatcgtcatattttttcgttccatgacctaactttttcgtctgaaaatcatgcttttaaacttttcgcgtcacactttcttcacgcgtcgccgctatactatgtttatagtcattaaggaaatcccaatccttaacgaccccctaactttaatgattacttccccaagtaatgatgtgtgtgtacttaattacattttaccgatttacttcccttttcctccgtatttccccgatacggaggttttttaatgccttcaagtagttgtggctcacgcgtgaacaccgtattaaccataatcattgccaatccaatttccaccataaaaaacgcgccaaggcgagaaacaaacttctcaaccttaccgcgtatcgtggtcctaatacttatttcatcttatcgagatcttctggtgcaataaaaaaactgacctgtcccgtttctaaatcaacatgcgccttcacttcaacacctttaggaaaaatccagcctttcccagtatctaactttaacggcatttccccatacgttttggttcgatacgtcttttccatcagaaaactccttcgctctttgccaattacgattaactgggctaattatataatctgacgtcgtttctcgatagtaaagacactttccaatggctttcttcagtaggaatgtcacgctaaatctgatagaatcggattaacattaaaccacttaggaggggtcgaccttgttctattcgttttttgatccgacttacctattagtcatcattggactgattatctcaatggccgcatcgggttacgttaatcggacattccggcattatgatgcctatcgtagtcaatctggcacaaccggcaccgatgcagctcgctttattttaagccaatctggtatcaatgatgttggtgtccaaaagataagcggggatctgaccgacaattacaacggtcaaactaagattctcagcctatcagaagccacagcagattcaacctctgtggccgccatcggagttgcggcccacgaatgcggacacgcagttcaagatcacgttaactattggccaatgcgcttgcggaccgccctcgtgcccatcacgaacatcggttcaagcttatcattaccactaatcattatcggcgttttattgagttacaaccaaacactgattcacattgggattttactcttctcactggcgttattgttccaacttgtcacgcttccagttgaattcaacgcctcaagacgcgccctccagattttatctgatgggcaagttttgactcgcgacgaagttcccatggtgcgtaaagtgcttgtcgcggcggctttaacctatgttgctgcagccctgtcaacattcttacaattactacgactaattattctattcggtggtaatcgtgacgataactaatcgcgccaaatggcagtgcccacagccagtcaccaaaatctgcttggtcactatcaacttagcgtcgccgcaaacttgttattactagcattgattgcgaatcaaaatagtcacttcaaaggacaacttttgaagtgactattttctttggccccaaacagtcgatcatcgcacctcgccaaggcattccgtaagaacgttgatgattcttcacacttcttaataaagcctttccctttttttcatgacattcgccatgttcagtcacaaattcttcacacaacctcggtatgattacatcatagcaattgaggttaactcaatcagctataacacaacctaaaatttttcatttactcctccaaagtaatgaaattcatagtaacatgtgattccccgtcacatgtttaccctactcctttttccaccgtattccccgatacggtggtttttttgtttttctcgtccgctctattcgcacctaccgactactttaatacgtcatagtaatcatatttgttgtactttttacattattaaaccaaaatataactaatgattaaccatgctttttagttattcatctgttaagggggagatttactgatgaagcaagtatcgattattggcgctggtattggtggcttaaccgctgcagtacggcttcaaaaattaggttataatgttacgatttatgagcaaaacgcgcaaccgggtggcaaaatgaaccagattgttagccaaggatttacatttgacgtggggccgacgatcgtcatgatgaaagacatctacgaagaagtctttcgcttttgcggggtcgatccgcacaactatttaccattcgaagaagttcaacctttgatgcaccttgtctttggtgatcaatctagtctagatttgtcacgcgatctcccaacattaattgccgagattaaccgcattgcgcctgatgacgtcaatggtatgttaaattttttagcggatatttatcaccggtataccatcgcgaagcctaattttttagaacgatcatttcgtaactggcgtgacttttataacctacccgctctgtatgcaggactacagttacgcacctttaacaatgcctacaaaaacattgcaaaatttatcaagaatgaaaatctacgtaattcattagcctttcagacactgtatattgggatttctccctaccagggcccgtcgctatacaacattattccgatgattgagctcttctacggggtctattttttaaagggtggtatgtacacagttgtcaatagtctcgttaagttattcaaagaacagggtggtacgttaaagcttgccacaccagttcaagaaattatcatcaaagataaagttgctgttggcattcgtgtcaataatcatccgatccacagtgactatgtcctatgtaatgctgattttccaaccgccatgacgacactgattccaaatgagcaaaatcgtggtcagtacacagatcaaaaaattgccaaaatggattattcatgctcatgtctcgtcttgtatttaggactagacaaaaaatacccaaccgaagcattacacacgatccactttgcacaagatttcagcaaaaacgtcgccgatctatttgacaacggcaagttaccagaagatccctcgtattatgtctatgttccatcaaagatggatccaagtttagctcccgaaaacagtgaggcactctatgttttagtaccagttcctgagctctcaaagtttaatgactggtcaccaacaacactgaagaactatcgtcaactaatcattaacaaactaagacaaacggctaccttcagcgatattgaacagcatatcgttgtcgaaaagcagtttacaccggttgacttcaaagaacagtttggcgcctataacggagccactttcggcttacgaccgacgttaaaacaaagtaattattatcgtccccataacaagttcgactatgccgaccatctttatttttgtggtagtagcacccaccctggggccggtgttcccattgttatgcaaagtgctaaattagccgttgaggagttgattaaagatgaccaaactaatgcctaaattcgaacaacatcgcactgactttgcgtactgtcaaacaattactaaaaggtcttctagcgcattctacaccgccttctcgcaattaccactagaacgcgcttggagtatttacgccgtttatgctttttgtcgaacagccgacgacctcgttgatgttgaccatgatattgatggtctaatggcattgcgccaatcattgaccacctttgccaatggtcatgtcccagaccacccaatgtggcgcgcactggccgtcgtttttgagacttatgatatgaatcttgacgtctttttcgatatgctcactggtcaagaacaagacgcgacttttaaacaacctcaaactcagcaagcacttgaagactattgctattacgtcgccggatcggttggtctgatgattttgccaatgctagcaactaacccgcaatcacttgtcaaaccagccgtagaattaggcagcgccatgcaactcaccaatattttaagagatgttggtgaagactaccaacgtggccgaatctacctgccatcaaaactattggcacactatcagctcaatccaactgacttgcatggccccatcccatctgccaattttattcggctttgggaacatgaagcacagattgccatgaacaagtacgaggctgcattaaccatgatgccacaaattgatcccgtcgcccggccatcgctattagccgccactttgctttatcgtgaattattgctaatcgcacgtgaacaacactacccaattttaagtcagcgcgtctttttgacagatgaacgtaaaacgcaggtccttaatcaagttagcactaaagtgcatgaactagcccttaaggaggcttaatgcgacttgaatcggtatcatacttggcacgacgaaatctgtccataccggaatattgaccacccacaaataatttttagttttttcaccagtcaagtaagcgatttagttaccttttaacaatcaaactactatactaaacatatagtgactggacatctccttcagccacttgaacctttttcatttactcctccaaagttaatgaaaaacaggctcgctggggatgccacctagcgaccaatgcaatttataggtcatcgcccgccgcgatggccttttatattactagaataatatagttacatctcacttctaatcggcgtatcatattattgagagattagaggagtgatatttaatgaaaaaaacacgcgccgtagccggaattagtgctcctgtggcaattttttcggccgccctattcgcgagtgagaagctctacgattttgctttcaagcgtgttgattacgtgcccgaaacttcggcagataaacaaaaatacgccgatgcctactacgcttatgtcgattggctacaccgacagcccgttcagcagtggcaactgaacgctaatgacgaggccaatcaccttgtcgcacagtacgttcctgctaaaacaaccagcaaccgaaccgttattgtttcccatggctacaaaggtgatggtgaaacgatggcaaattacgcttatatgttccatcaaatgggctataacgtcctcttgcccgacgatcgcggccatgggcaaagtgccggcaagtacattagctttgggtggcaggatcgccgcgactatttaggctggatcgataaagtcgtccgtatcaatggtcgtcacacggatatcatcctttttggtgtcagcatgggtggtgcgaccgttgaaatgatgagcggcgaagaccttccatcacaagttaaggccatcattgccgattgtggttattcgagtatcgaggaagaactcgcttacttattaaagcgacagtttcacttaccaaagtatccgtttgtgcccatcgttagttttattaaccgccaccgtatgggctattatttaagcgacgtcagttctgtcgaacagctcaaacataaccatctaccgatcttctttattcacggtgacaaggatgtctacgtcccaagttggatgctcaaagaaaattatcaggccgctaagggccccaagcagatgtggcaggttcccaacgccactcacgccgagagtttttggatcgatcctgccgagtatcaacgacatgttacagcctttttaaatcactatgttcctgataaataaaattcagtcgaaaaaccgtatgcgctattcactacgcatacggtttttttgaccgcttaagttttttatgactggctaatgattcgggctaagcggtccgccatccgttccagattggctggtccctgcgccatggcttgatctaaggtcatgacttgatcgacaatcggtaaaacggccgtgaccccctgtttggcaaatgtttcatttgcacctttctgccgaccaactaataaatagcaaggcttgccggccgcttgggctaactgactgagctgaattggtaccttgcccataaaactctgatcgtcgacttggccttcaccagagataactagattcgcttgggccactttcgttttaagattgctcatttcagctaacaattgaaaaccagagcaaacgcgggcgtgtaaaaagtaacgtaatgcaaacccaataccaccggcagccccatcgccttcgtgggcactcaccgcaccagctgcgaccgtcatatagtgagctaaagcggcatcgtgaacctgaatttgagcaaccggtaatcctttttgtgggccaaaaatcttagctgcgccgttcggtcccgttagcggattcgtcacgtccgctgcactaatgaacgagacttcagctaattgtggcaacacatgtcgatcgtcaatcttagtgacccgacttaaatcagcaccagtcatggataactcttgaccatcggcagcccaaaaacgataaccgagcgcacgtaggattccggcaccaccgtcgaccgttccgctaccacctaagcccagaataatctgacgggcgccacgctcaatcgcatctttaatcagtagcccggtcccataggtattcgttgctaacggcgtcaaggtcgtcgtgacaaactggattccggatgcagccgcaacctcaatcactgccattttttcagtggcaaagtagccatacgttgcagtcactgaccgttgcgccagatccaccgttgatgccgtaatagcttgtccaccagcatggttagccagccacgccgccaccgttccttcaccaccatcggcaatcgcaacttgagtagcggtgattccgtgagccgcaaatcgtttagccactattcggttggcctgaatgctcgtgatggaatttttaaatgaatcaattgcgatcaaagcgtgcatattaacgtctccctattgacataattacttttagtataatcattacagcgggcgcgagcaattcatatcagttgtcaggtttcttaaaactcgttaagcttaagttaccaaaattttaatggaggctgataaatcatgacaaacaaatacgattacgatgtgttatacattggtgcgggtcacgccacgtttgatggcgccgcaccactcgccaagactggtgttcgcgtcggtgtgattgagagtggtctgattgggggcacctgccctaatcgtggttgtaacgccaaaatcactcttgatgaacctgtcaaattaacgcgggaagcagcacgcctcaatgatattttgagcagtgcaccaaccattaattggacggccaacgtggcccataaacaagagattattgatcccttaccagcaggcctgacagctcgtttggaagatggtggcgcaacgatcattcatggtcatgccacgttcaaggacgctcacaccgttgtcgttgatgatcagcaaaccattaccgctgaaaaaatcgttattgcgactggtttaaagccccatcgtttagatattccggggaccaagctcgcccacgatagtagtgattttatgaaccttaaacggttaccacaaagtatcgtcatcattggcgcaggctatattggtatggaatttgccaccatcgctaacgcggccggtgcccaagtgacagtcatgttacatggcgaccaggccctccgtgatttttaccaaccattcgttacacaagtggttgacgacttaaccgaacgtggggtaaccttcatcaaaaatgccaacgtgcaagcatttaccaaacaggatgaccagttccaagttagttatggcgaccaccagcaattaacgaccgactggatcctagatgcgactggtcgaattccaaacttagatggcttaggcttagaccagattggcgtcaaatatgaccgccacggcgtttatgtcaacgatcacttgcaaaccaacgttcctaacatctatgcagccggtgatgtccttgccaatgacttgccaaaggtcacacctgcagcctattttgagtccaaatacttgatgcgtttgttctctggtcaaaccagtgctcccattgactatccggtaattccatcggtcgtctttacttcaccacgaattgcgcaagccggcatgaaaataccggctgctgaaaaggccggcttaaccattagtgataacgatttagcagattactggtattatcaagtctccaaggaaccgattgccgctagtaaacaggtccatgaccaagacggccatctcgttggcgtgactgaaatcagtgatcaagctgaagatgccgtcaacgcactactgccagctatcgaatatcaattagaccgcgaacaaatcgaccgtttgatcggtattttcccaaccatcggctacgcagcttggcaccgggcttaaaacagaaaacactgctgcgaccgccgcttgattaatcccttattaataaccagagccgccaatgacccccactcattggcggctctggttatgttcgttccattactttagaaaccaactcgggcctgcacatcaagcatactgaccatgctataattgcgcctatctcaacgattgaaaggttggtcctaacaatggatgtggatgctcaaaaattatttaccttagtagatgctgcttataatcagccgattaccaatcaaccatccgattcctaccgccaagcgctactggcagctgcaatcgacctgaataacaacgtttcgccacagcaagtaaccatccagctatatcaagcctattatcgtaactatatggtcccaatgactctaccacgccagcatcgtgacctctaccaatacgttcacacccaattacagcgcctcacgcgcaaagaacagcgtcatatggcacttgggtatggtctgattgcgacgcacctaacatttggtcccttgaactgaaatcaaggtacttacacgcattgcgctagttatcgtttagtatgaagcatgattaaaccgtgccattatcaagctcaaaaatagccagtaatcgtccccagccctggaggccggaataggacgcgcatcggctgacgaataaacagcccatctttttaacacgttttaatcataataaaagcctcagcgattaccatcgctggggcttcatcgtttttaaattaatcgtctaatcccaatcgtttgaaaatatcatcaacgtggcgaagatggtaatgatagtcaaacgcatcatcaatcgcagcctggtccaaatgttcacgaatctcggcgttaccttcaacaagtggcttgaattgtaactgttcatcccatgacttagccgtcagtggttgaacgaggtcataagcactttcacgagacatccccgtatcaatcaacttgagcaagacacgttgactgtagatcaacccgtaagtcgcatccatgttttgcttcatccgttctgggaacaccgtcagcgtcttaataatcttattgattcgagttaagatataatccactaaaatcgtggtatctggtaagatgatccgctccgcagaagagtgggaaatatcccgttcatgccacaatggcacatcttcataggcggtcatcatgtggccgcgaataactcgtgccaaccccgtcacgttctcagaaccgatgggattacgcttgtgaggcattgctgatgagcctttctgacctttattaaagaattcttcaacttcatgagtttcagatttttgcaaaccacgaatttcggttgcaaacacttcaacgcttgttgcaatcaaggccaaactagcaatgtattcggcatgtaagtcccgtggtaaaacttgcgtcgaaatttcttgtgcgcgcaatccaagttgtttgcagacaaattcttcaacaaatggtggaatgttcgcaaaagtcccaacggccccactgattttacccgcttcaacgcctgcggccgcgtgttcaaaacgctcgatatcccgattaatttcagaataccaccgggcaatcttcaatccaaatgtggttggttcagcgtggacgccgtgtgtccgccccatttcaaccgtatatttatattttttcgcttgttgtgctagtgtcgcccgtaaatcttgtaagtcttggcgaataatcgcgttagcctgcttcaaccggtaaccttgcgccgtgtcgacaacgtcagtactggtcagcccatagtgaacccacttacgttctgcacccaacgactcggaaacatcgcgcgtaaaagcaaccacatcatgatgcgttacggcttcaatctccgcgatccggtcaacatcaaacttggcattctctcgaattttagcaacatcacttgctggaatcttccctaattcagcccaggcctcgtcggcagcaatctctacctccaaccatgcttggtactgattttctaacgaccatactttgcccatcgcgggacgcgtataacgatcaatcattgctaatcctcatttctttttaggtattcactaacaaaacacgaacattattatagcatacccctcgagtaattaatagagacgaacaatgaaaaaatactgttatttttcacttcgtttccatattaaggacttgttttcgaactaattcaccttaattatgaacgattatttgtgctcaaaacaagaacattcggcttttgggttgcgttttgacgttaaagttgctatactctttcctgttggagtggtgaccgtttaactactctttaggattaattattcataattaaactatttaatgaggtggaagaatatggcatcagtcgtagtagtaggtagccagtggggcgatgaaggtaaaggaaagatcacggactttttgagtcaggaagcagatgtggtatcacgttaccaaggcggcgataacgccggccacaccatcgtatttaatgggcaaactttcaaattacggctgattccatcagggattttcttccatgataagttagctgtcattgggaacggcgtggtcttaaatcccaagtcattagttgaagaattacaatacttgcgggacaagggcgttaatcctgacaaccttagaatctctaaccgtgcacacgtcatcttgccttaccacatcacattagatggcgctcaagaaaaagctaaagccggtggcaagattgggacgactaataagggaatcggcccagcctacatggataaggctgaacgaattgggattcgcgtagccgacctgcttgataaggacacctttgcggcgttactcaagcgcaacttagctgaaaagaaccaaattattaccaagctttatgacttagaaccactgaaatttgaagatatttttgatgactattacgcttatggtcaaactttgaaaccattcgtcaccgatacttccgttgtcattaatgatgcgttagataacggtcaacgcgtcctatttgaaggtgctcagggagtcatgctggatattgaccaagggacttacccttacgttacttcatctaacccagttgccggtggtgttactattgggagcggtgttggcccatctaaaatcgataactgtgttggggtcttaaaagcctacacttcccgcgtcggtgacggcccattcccaactgaactctttgacgaagtcggtgatttcattcgtgaaacggcccatgaatatgggaccgttactaaacgtcctcggcggattggttggttcgatagcgttgtattacggcatgctaaacgagtttctgggtttactcatcttagtttgaactgcttagacgtcttgacgggcttaaagaccatcaaggtatgtaccgcttatgacttaaacggcgaaaccatctatcactaccctgctagtctgaaggaattagaagcttgcaaacctatctatgaagaacttcctggctgggacgaagacattactggcgttaaaacctttgaggaactgccaactaatgcacagaactacttgcgtaaattagaagaactcgtcggcgttaaaattgccaccttctctgttggtcccgatcgcgaacaaactaacgttatcgatcacaacatttggggctaattgaacgtgacaccgtgaattaacttaaaggagttttgcatcatgggcatggagatttttgattacgaagatattcaactaattccgaacaagtgtgtcattaatagtcgttcggaagccgatacgaccgtagaattgggtggccgtcgttttaagattccagtggtgcctgccaatatggcaaccgtcatcaacgacgagattgccaagtggctcgccactaacgactacttctacattatgcaccgcttcgcccccgagacccgccgtgcttttattgaaacgatgcatgccgcgcaactgtacgcatctatttcggtcggtgttaagtccagcgagtatgactttatcgacgacctggctactaatcaaatcgtgccagaatatatcacgattgatatcgcacatggtcatgctgacagtgtcattgcgatgatcaagcacatcaaagacgtccttccggatagttttgtaattgccggaaatgtggccacaccagccgccgttcgcgaccttgaaaatgctggtgccgatgcaactaaggttggcgttggcccgggtaaggcctgcattactaaagtcaaaacgggctttggtactggcggctggcaattagctgctgtccggtggtgtgctaaggccgctcgcaaaccaatcatcgcagacggtggtgtccggaccaatggtgacatcgccaagtcgattcggttcggcgctacgatggtcatgattggctcaatgttggccggacaccaagaatcacccggcaacattttaaaaatcgatggtaagacttataagcaatactacggttccgccagtgaaactcaaaaaggcgaacataaaaacgttgagggtaaacaaatgctggttccttaccggggccgcttagttgacaccttaaacgagatgcaagaagacttacaatcatccatctcatatgccggtggccgggatttaaaggccattactaagtgcgactatgtggtagttaaaaattcgatttacaacggggactaattaagtctcactaatacctaaaaaaacttgtcagccaattctggtctgacagtttttttagtatccaattctaatttttgcacccactttaccctgacaccggaaatgaaagcggttataataaagctaaatcactaatcgaggtaatcagactatggaacacaatcgggtcttacgactagaacacggcatcaacttccgagaactggggggttatgagaacaccgctggtcagacaatcaagtggcaaaaactgctgcgttgcggtggcatgtcactactcactaaccgcgatctcacctacttggataactacggactccgttatgatatcgatctgcgccaagccaatgaagctgagatgtctccagaccgttatcccaagaatactaagtatattaatacgtctgtctatccgttcactgacaatcgtcgctttgatcgccgtttaaaacggctcatcaagcgaatggtcgtcgatgattccttcaacgcacaaacatatgcgcaaatggttacggatagtcatgccgtgaaagtctggcaaaatttatttgcgaccctcctcaccaacgaccagcccgaccaatcggtactctttcactgtgctgctggtaaagaccgaacgggggtcgcgggtgcgctcattatgacggccctagacgtcccccgtgaaacgattatgcaggactacctgctcactaacgccgtcttcatggccgcagacagtatggataccgctacgattattaccaaggccaatgctggtgacctagctagccaattcaacgttgccatggctgttgaagccgacaatatgaagatggtctttcgggttttcgacgacctctacggcaatggtattggttatttacgagaagtgcttgggttatccgtagcggatattaataatttgcgccaattgtacttgaacgactaaggaacactaaaaaaactggttttgaaagtcaataactttccaaaatcagtttttttgcatcatctattcaattgtttaattataaaattggtgataacaaccgtgaaaatgtctgcttgaacttcaaccagaatgattgatttttaaagtcttgaacggtaatcaaactactgattttttgatcttctaagaaaatccgttccaattcttgtgctaaatcagcatcatataaaaaggcgttcacttcaaagttgagcttaaagctccggaagtccatattagctgagcccactgacgccacctgaccatcaatcacgatggtcttggcatgaataaaaccattattataataatagatttttacaccagcatctgccagctcccgggcatagtactgagttgcccggtaaacaaaggcatgatcaggtttgtccggcaccataatgcggacgtcaacccctgacatcgcagcgattttaatcgcatctaatacggaatcgtccggaattaggtatggcgactgaatccataaacggtgttgagctgtcataatcattttaatataacccaatttaatctgttgtgcatcactgtccgggccactggagacgatctgtaatgaagtattccctttaacgcgaatgactgggaacatattaacgtctggcacgattcgatgttccgcatcggtggcgttccaatcacgaatgaaacgttcctgcaattcaaaaactcctgaaccgacgatccgcaaatgggtatcacgccagtaaccaaacttcttactacgaccaaggtactggtcaccaacgttaaaaccaccgacgtagccgacccggccatccgttaccacgatcttacggtgatcacggaagttgagacggaagtccaaaatcgctgaatgagcacccaagaacggtcgggcatgcccaccaagttcttctaaatgcttaaagaagctgcggaacgtgcccatcgacccccacggatcgtacaagacacgaacgtcgacgccttgggctgctttccgctctaaaaggtgtaataattcatttccaatctggtcattataaaatgtgtaatattcaatatgaatatgattcttagctgcttcaatatcttggaacatcgcatggaacttctcatgtccatccgtataaatcttgacccggtttttacggcttagtaacgcgccatcggaattcaagaataaactgaccatcccacgaaccgaactagtgaccgcatctgcgggcatcaattccgttcccagggcttcacgttgccgctgaatcatctgttcgagtctaatttgcgtctctttacgtaaccgaaataaccggttttttggtaacttacgaccgacaaaagcgtacgcgataaacccaataatcggcaaccaaatcaacacgagtagccaagcccaagtggccgcgatgtcccgattacgatcccggaacacggtaacgaacgccgcggccgcgtttaaaacgataattgtatagaaaattggctgaatatattgcaatggaggcacccacctaatttattaatgatggttttattttaccgcagatagtagtgagataataatcttttgcgaatataatttttgcatttaatcattaaatagctaataattatgcttaaggagggcgcgttcaatgcttgcaatgcttggaattcacggcctcggccccattcgcatgtttcacttaaccgaacacattgcgggtccgcgagcggccgttggtattttactaattattattttattagcggtcgtctaccgttactatcgacgacatcgttaataaatcaaatctttgaagcagctggtgaagtctcccagctgtttttttgtgggtcattatcttacggatcggtttattcaatcattgcagtatacctctgctaccactggagaaactcataacaaatatttttgaccaagttaaatcctcaaataaaaaagttgcgttgattagacaatcaacacaactcgattcgaccaccccttctgaacatctgttgtatggcctgattgagttaacgcattacctaccccatttttcaatgtaggccgatagtaaactaaatcattggaaccacctggttaatggctttttatgaaatcgttagttcacacaaagacttgtcgcttaaagcttggacgtaattcgaacgtcccgttgcgctgagtttttgattggtatcgagatagatttcacccgtccaatgctttatttttttagtcggcggtctaacgattacgcgatagacgatggggcaatttttcagggtcatattttttgatgactgatgcaaaaactttttgtatttcttactttccgctaatgtttggctggttgcaaatgtgtattcataccaaataatgccgctaaaagggccggattcttccttgattattgtgtttctcgagacacgcacgtcataaggactgctttttaatattgttgttagtacagtcctcgcttgatttaactcaatacgatttttaacgtacccgtataaacagaagctactaataaggataattgcaaaaagcacgtaatgtgtaacggtctttgctttaagaaatgacgacatgactaatgcctcccaactttattatctggaaatagtctggcaatgctttatacattatgaatgcagacgtactagtatcaatacttttattaccaacaccaaaccaatcagcttgctatccccttttttgattcaagatctgccagtcattgcaatcactagcttcgataccagcaacaatcagcagacccagtagtccactaatttcaagtggcctttaatattggtcaggccttgatttgcgttctccttttgaatatagcaaacgccaaacccattgtcaccaactaatgaatatcattcgtatttgttaattttagaattgcaatcaagtttgtatttggaataataaaatttatgcaaatgtggtcaataaatgttgatattggaaggtcgagacgagtcacatcagtttcccgtaggccgttttacctgcaagaaaattaattatccaatttgattcatcaaaatactttaaggataatcataatcccattttattcatataatcgatatcaataaaaaagggttccaataagccgctcactctctccagttcttcaggttgcatcaatcaagtggcgatttagtgagccaaaaccatattttctaaggtccttcaataatccccactaacaatcgcaatcacaaggtaagttaaccttcagaaaaacaatccccgccatgttcgctatatcaccctattaataggcgttgaataccgtagctaattaatcacgattagtcagacaatcaataagaagtcgcaggatgtcgcgcgattgcgtccaattatttggcttttagtcactatagcccatcagaatatttattttggtcggattgaccatcgtaactttgtcaaaaccgattaaactaaagctatcacatcgaaatggggcgatgattatggatttatcacacacgcggttactccgcaaaaaagatatcaatgcaatgttagccacttatcacagtccgctcaaaaaggaacttaaaacatttgacctaacgatgctgggaattggggccatcatcgggaccgggatcttcgttttaactggtacgggggccttgacggcgggtcccggcctaatgatctcattcgtcttagctgcaattgcttgcctgtttgcttcactctgctacgctgaattcgctgcgatggtgcctgaaagtgggtcagcgtacacctatgcctacacaaccctcggcgaaattgttgcattcattatcggctgggacttgatgttagaataccttttcgctgtctcaaccgtttcagcgggctggtcaggctactttcaatcattcttggcgggcttcggcctcaaactgcccgctgctttgtcggcagctgcaggttccgtccctggtgtgaccagctattttaatctgccggccttcaccattattatcctgattaccactttattgtctctcggggtcaaagaaactaaacgcgtcaataacgtcatggtagtgattaaattagccgttgttcttttattcatctttaccgcggtgcgcttcatcaaaccggcaaactggagtccgttattaccatttggcttcaaaggggtcttcggcgcagcctctagcgttttcttcgccttcatcggttttgacgccatttcatccagcgttgaagaaacattggaaccatccaaaacactcccacgttccatgttactgtctcttggtatctgtaccattctctacgtggctgtatcagccatcatgactggcgtggtcccatttgaaacgtttgccaagtacattgatcatccgatctcggccgttcttatttactccggtcaaaattggatggccggaatcattgaccttggcgcgattcttggtatgaccactgtaatgttagtctgtctctacggtcaaactcggatttccttctccatgtcgcgggatggattactcccccatgtctttagcgatattagcgccaagaccggtgcaccacttaaatcaaccgtcttgtttgggtcgattgccgcaatcatgggtggcttgattccattagctgacttagctgaactggtgaatatcggtactttgactgcctttaccctagtttccttctccatcttacggttacgtaaaacacaaccagatcttcggcgtcccttcaaaacgccatgggtcccgtttgtaccaatcatgtcaatcatctgttgtgtcttcctactaatcaacctgaagcctgtcacttggattcgcttcgtggtatggttagccatcggtatggtcgtttactttggctattccgttaaacactcccagttgaagacgaatacagccactgatgagaaataattgactagactaataaattcaaaactaatgggtcgcttcatttcagcgttatcaactggaatgaaacggcccattttttatcctctaaatacgaacaaccggattacttattgtactcaacttgaagtaaagttcacctaacgaaacgtaagttgaaacttgttaacatgagcaaatttttagtttgtctggttaaccccttttgaaaaaagctagtatagtatgagtcacagttctaattgaagtgggggtcaataattcatgcgtaagcaacggattcaggaacgttcattgattggcatgttaatcacattaggcgtcgtgtacggggacatcggaacgtcaccgctatacgttatgaacgccctgatcaatgacgcggggcaacttaagaatgcaacacctgattatgttatcggcagtgtttcattaatcttttggacgttgatgctcattacaacggtaaagtacgtcctgattgctttacgcgctgataatcatcatgaaggtggcattttcgccctgtatgcgctggttcgtcaccgggccaaatggttaattttcgtcgcgttgattggtggcgccgctttgttagcagatggcaccctaacacctgctgtgacagtcacatcagcagttgaaggcttaaagggattacccaaactgggggctttttcccagtacccgtggctcgtgcctctaaccgttacggttattttactggttctctttatgattcaagggtttggtactgccgtcgttggccggtcattcggtcccatgatgttgctctggttcaccgtcatcggcatcttcggtctgatcaacatcagtcaggcacccgtcattctcaaagctttctcacccgtttacgccgtacaagtcttattcaatccggctaataaaatgggaattttcattcttggtagtgtcttccttgcaacgaccggggctgaagcgctgtattctgatatgggtcacgttggtaaagccaacatcgacgccacttggccgttcgtatacacgactttgattctcaattatcttggtcagggcgcgtggatgttaacccattatcaggatgcggcatggcgcaatgccaccaatgtcaatcccttctatgccatggttcctgcgggcggtcaaattgcaatgattatcttagccacggccgcagccatcattgcgtcacaggccttgatcacgggctcttataccttagttgacgaagcagtcggtttaaagttcttaccacgtatgattatcaagcaccccagtaacgttcggagccagatttatattggtgcgatcaactggctgttatgtctggtcaccttaggaatcgtttggctatttcaaacttcagctcacatggaagcggcgtatggtttagccatcaccttaacaatgttgatgacgaccatcctgcttagccagtggattcacatgaagggccaccgggcgctggcgctagctttattattcggctttggcgcactggagaccgtctttctaacggctagtctgaccaagtttattcacggtggctatttgaccttggggctgaccctcgtcattttcttgattatggtcgtttggttctttggtaatcgccggcgtttgcgttacaaccaggcaaatgaacagattagtctgctagattatcgtaatcaactgatccagctaagccacgatgatcacctgccagtatttgcaacgaacttagtctacttggctaaggtcgaccatcaacaccgggttaaacggtcaattctgtactcgattttagataagcggcctaaacgcgctaaggtttactggtttattaccattaatgaaaccaaccgaccttatgattgtagttacagcattgacatgctaggcactcgaaatatcgtggaagttcaactcaacttaggtttccgtaaatcacagcacattaatttatatttgcgccaaattgtcacgaacttaattgcagatcacagcatcgatccccaatattcccgttacggaatcacacaacctcgtcaagttggcgattttaaatttgtcgttcagaatcagcagatcatggaccttgctagcaacccaactatgggccagttcgatcgactactaattggtggtcgcgttctactacaaaacatcaccccatctcctgctatctggtacggcttagcgtttagcgatgtcttggaagagacgattcctttgttcacgaaaccagcaacagacgccacactaacgaatttgacggtccaccatgcccgcacgccgcaacggaattcgcgccaaccataaataaaagactagtttcaaggaattcaaccttgaaactagtcttttattattaaaatctatcagtcaacacacttatgtttgcggcataaacattaccttagtgtcaataatgccatactgatttcgcatcacttgctcgattctttcactgagctgaaagctggctgccactgtcattcgtggtgacactgctataaccagcgacaaggccactaagctcccagaatactggacatcaattgcattgacctgattcacaccatcaatttgttgaatcgtattaatataatttttttcaacttgtggatcactgtaattaattagctgcaacccactgtcccgaaaaatttgtaacccagcggcaaaaataaagaatccaatcacgatactcgcaacactatctaaccaagcaaatttgaatagtaagaccccacttaatgagattaaagtgccaatgctcgttaacgcatcactaagactatcctttgccgcagccaatagcgtcgaattatctaattgttgcccaccgcgacgattaaagtaccagacgactaacataacgatgctcgcgattgcagctccccaaacagttacaccgctcactgcttgaacggtgtgtgatttaaacaaattactaacaccactcacaataacttgtaccgccataactaacataatgaccccactcattaacgtgaataagtcttgtaaacgaaatcgcatcaatcgattgcgacgttcggcctcccagccgtccaaagcggtcactttactttgatgtgattgatgattatgaatgccaccccagataccaagcgataacaaccccgatgaaacaatacccgcaaaattattaaacgcatccgcgtgcaaagattgcgaatgaccaatcgttgcaagcactagttcgattacaaatagacttaaatatgctatcgcattgcccaacaaatgccacaacgcaccttgcattcgcttaatttggtcagcttcaatttcttgccagccatctaacacgggatgttgattatttgattgattaatcgtaatcgccccctcctaaacagattccaaccgctcactctaacacttagtcgaaataagtcaaccttataccacctagaacgctgatagcttaacactaacagtctgacttgtaattgtcactatcagcatctttaagcagtaattaattaaagctggcaccttcgaaagtaatccacttcgaagataccagcttacaattatctttgataacctttacgcgcagtcacaagctactgttcatataaatcacccgaccccatacaaagtctgctaccggtaaagtacagttacaatcacactaaggttcacgtttcgctatttgagacgtcacgcgtcgcggctcagaattctgcacacccaaaatgtctaggaagaatgaaacaattggaatcccaatgatcaagccccaggcccctaatagactttccataataatcaacgtaataaaagtgacaaagactggtaaatcagtccgatccgccattagccgtggatgaaggaaataagactcgaaggcgtgaatcaaaataaccaacacgatgatccagacaactcgaatcaagccacccgacgcaaaccccagtaaggttagcggaatcattgaaatcaacacgccagccaccggcactaagcctaagataaagacaatgatcgacaacaccatgatacttggcatcccaataatcatgaacccaatcgtcatcaaaatcgtattgatcgtacaaatcaccagttgcgtttcaataatccgccccagaatcataacgaatttatgcgttaaatagtaaacgttcgtgaagaactttttaaacttcgactgcaagaactggcggccaaagaccatcattcgtccccgcgaaactgcaaagataaaactcaaaaagattgccattaagacgtgcgtaaaaccagtcccaacctcactcagtcctttaataccggtgacgagtaacgccttcccgttttgaatcaattcactactatgaatggcttggttgacccatttatcaatattcttattcaataccgggtgattggtgattgctttagccagcatatctggaatgaccttcaactgatcgaccagggtaggcgccgcgtacgatagcgcaccgataaacaacgcaatcacgccgacgtagaccacaatgacggcaatccaataaggtaagtgcgttcggaggtttaaccaccgactaagcttaatgcccaaatacgcaaaaatcgtcgttaatagaacaactgtcgcaaacccgcgcattaaataaataatgatgattaataacgccaacgttaagtacaagtcaacgtcatcccgcttaaaaaaccgaatgattctatccataatttgcccccaatcgcatgttacttgcattatagcatgactatggattaatcccgcccaccgattccggccttaaattaaatttgacatttaaaataattaccagtatgataggtgtcaataattaaagaacgattaaaagatgagtaattggtgtcgctgttcagcgagtatcgggttggtgaaacggtaccggcacaaccaatgaagatggtcttctccctagttcgttttggtgagtgtctggtgagcaacaaagtaaccagcattaactaaagccggtttaacaaccgttacccgcgttagcaattgccaatcatttggcagctgtatcgagtagactagttcactagcctagaactcaggtggtaccacggcccaacgtcgtcctgaataatgattaatattattcaggacgacgttttttcgttcccaataaaatttaaggagtttgatatttaatgacaactacaactttaaccgccccattccgttttgacgtcgtcggcagcctactgcgccccgctagtttgaaaaaggcccatgaacaattagccgccggtaccattacgcgtgatcaagaacttgaaatccaacacactgaaatcaaacgagtggtcgctgaacaagttaaactcgggctcaaagccgtgaccgatggcgaattttcacgcagctggtggcacttagatttcctttggggcttaactggtgttggcaagtacgactaccatcaaagctataagttcaagggggaccatactcgaacggataacgctgaacttattggcaaagtcgcgtataatcccgaccatccgttctttgctgcctttgaatacttacaatcaatcgttcccgctggcgtactcgctaaacaaacgattccatcaccaactatgttattccgtgataatcggagtgacaattggaccaaattctatgacagctgggatgcctatttaaatgatctcgcccaagcttatcacgataccattcaacatttttatgaccttgggtgtcgctatattcagttagacgatacgacgtgggctttcttaattagcaaactcaatgatcccgaagctgaccacgcggcctacactaagtgggcgaccgatgccgttaaagtgattaacgcagcattagctgacctgccaagcgacttgaccgtcacgacccacatctgccggggtaactttaaatccacgtacctcttctcgggcagttacgacgtggttgcaccctaccttggccagcttaactatgatgggctgttcttggaatatgataacgaacgggcgggtggcttcgaagcgttagaccagatttggaaccatgatgaccacaaacgcatcgtattaggtctggttacctctaagtttccagaattggaaaagaccactgtgatcaaagaacgagttcaagctgcgaccactaaggtgccattgcgtaatctagcactatcgacccaatgtggctttgcttcaactgaagaaggtaaccagttaactgaggctcaacagtgggccaagttggcgttagtcattggtacggctaaggaagtctggtcagaagcttaattacaacaactaaaaaagatcgagaatcaaccggcgcatttcaagcgtaatcgcttaaaacatcagccagattctcgatctttttagttaccggttaaaccgggtccgccaccgtgccaagcgcggcgtcgcagtagccggtttagtcgccttagcaggcatgttcaatagaatcacacccgtaataatcgccatgaatcccaacgttttcaatcccgtcaagatttcgccaaacgcccaaattccaatcaggccggtcgcagctgtgccgactccggcccagattgcataaccaacactcagtgggattttgctcaatgcccgtgagaaactaaaaatcgctaggccgtatagtaacatgcccacaattccaaccaaggggtacttaaatccagccgataacttcaacaagctggtccccgcaatttcaacgccaatcgcaataactaattgaatccatgcacgcatcatcattcccccttgatttaaatgttcagtaaaatcgccccgactacgattgcaattaagccactcagacgtgagagactgagccgttcacggtaaacgacgaccgctaaaataacggttgcaaacgtgcccagtccagcccacatggcatacgtcacccctaacggcaggcgttgcattgcaagcgttacaaggactaacgaactaaaatatccaaccaacaccattatcgttggtattaagttccgaaaaccgtttgcgcgctttaagaaaaagctccctaaaacttccatgaaaatgccaccaaataataacccgtatgccatcttaatcacctcactaaaaatttcgttgtcctactattctacggaagtttatttaaaaaggcaatcaaaagatacgcctggctgattacagtttgatgacaaaaataaatcgtattctagactatgctacagcgatctagccatttaatttcaaaattattgttagctgagtggcgataactcattcagcttaacgagcgtacgcaatggttacgattcgaataccgtccagttgaaaaacttttcgcaataaaatgtcaataatcagcatttaagacgtcatccgcgactcaaatctcccgcatctaaaaaaaaaggaccaactcagcagctggtccccacagtcatccttaaatatagaaataaattgagaaaaacatcaacgtggttcccaccatcacgaataggtgccaaataacgtgtaaatatttaatccgtgggaaactatatagtaatgcacctaaggtaaacgcaacgcccccggcaactaataaccagaagccagtgacacctaaatggtcccataactgccgaccaccggcgaggcacatccaccccatcaacacataaatgaccgtttcgacctttttcaaacgtccaggccaaacagcattaaccgtaatcccagcaatcgctaaaatccaaatcgttaataagatcgtccagcccaaccaacccttaatcgccagtagactgtacggcgtgtatgtcccagcaatcagcacgtacacgccactgtgatcgaagatacgaaaaacttcgcgggcgcgcgtaaagtataatccgtgaaataacgtcgaacacgtatatagtacaaacaacgaacaaccatatataataaacgccgcccattcgaggggctgaccatccgcatatgccttgagcatcaaaaaaacaaatgcaacgatacttaaaataatcccaatcccatgagtcactgagttgaggacttcatttgttatttgatactgtcgcgccgactgtgccatgttaatcacctcatatttattattgacaccagcataccatcacatagtgtaaatatcaatacatctagtttataaaactaggtaattaacaaaaacataactagttcaaaaaatgacactgcgaaattaaccatttcgcggtgtcatgctaagcacaatcttatattcaagctaatcgtgcggtcctctaggccatggatatctatatcagtgcccactacgaacccacagcgcttaccactcatcataactgatcagtggttacacctattcaacctaattatcggcttcttcagcgtgagctgcgacctgctgaaaaatactaatgatatgtttatcggccagctggtagtgcacgttacgcccattgcgcgttcccacaactaattttaattgtttgaggaccgttaactgatgagacacattcgactgtgtcagggctaatcccgtcgccagttcacccacactcagcttagatacggccaacgcgtagataatccgggcacgcgtcggatcaccaagtgccttaaagattgcggtgatccgactcaactcatcagtcggcggcatcagttcagccaaccgtttgacgatcatttcatggtccatttcattttccatcataaactccaatttctaattgagattgtcatgtaagcgtgttacaatacacatgaacagtcattcatatgtttgttcattcatatttaaattatagccataacaaggataaattcaactaagaagtaggtgattcatatggcacacagccatcaaatacaacaacagaccagcgccttcaagattggggtcgccctaaatactgccttcattgtcttggaagctggctacggttttgcgagcggctcactggccctagttgctgatgcaggacacaatctcagcgacgtcctgggcttactgatctcctggctggcaatctggcttggacaaaaaagcgccaacgataagtacacatatgggtacaaaagctcatcaatcttggccgccctcttcaatgccgtctttttactagtcgctatcggggccatttcagtcgaggccatccagcgccttagtaatccgggtcccgtcgccgaatgggatgtcattatcgttgctgctgttggggtcgtcattaatggctttaccgcattactctttatgaagggccaaaagcacgatctcaatattaagggcgcttttctccacatggccgccgacgccggcgtctccatcggcgtggtcattgctggcttcatcatcttgaagacaggctggttctggctagaccccgttgtttccctgctaattgccgtcgtgattttgattggtacttggggactcttacgagatgcgatgaattattcactggaagctgtaccgaacaatgttgaccgccaagcaatcgctgattatttaaccagccagcccaccgtcaaccagattcacgatttacacatttggggcatgagtactactgaaacagccatgaccgtccatctctgtcgttcaacattagctgacaataatgcctttttggaacaactgaacaaggacctaagcgcccagtttccactaactcatatcacgattcagattgaacttggcaaggtggattatgaaacaacggatagttcgatttagttcatcgtgagttaagttatgatacacagcatccaaatcgaatctgtttctgtataaactatctcttccgccttaaacgaccgcatgctattaagcatgcggtcgttttttgtcttacacattttcgttagtttgagacgccacggctcacttccaaactcatcaatattgactagctcggtaaactacgaccgttctcgttgttttggcttcaaaaagatagctaataccaaacttaatatcagtattgatgtgaccagcaagcgaccggccacttcaccaattatcgcagcggggccatcatcaacggcatgtgctaactcgttcagataactcggtactattgtattgatcagaatctcagcaataaatgcaataaacaccgtgatgacgataccgacacgcaatttacctgacttgaaccgctgccaatctgaaaaatacgacaataataccatggcgttcaccagtactaaaaacggtaccaaaaacgttcgtattccaaacggccgcaaatagtcaatgtagccaagtaccagtaacaagaaattgcatcgatacgagacgaccacccattttcggctcttctgatgaagttgttctgcttccttataataagccagtaagtgatcatcccgcattaaatcgtctagccgaacgtcataaatatcactcaattgaactaaactgccaacatcgggaaaactgtggtcattttcccagcctgagattgttttgcgcgatacatgtaattgttcggccacttgcgattgtgtcaattgtgcgtgcttcctacacacttttagtttttcagagaatttcatatcagactttcgactactccctcatactttggttgccataacgcgattaaaaatcatgcttttttaccatgacctgatcaaaatgcacgttcattcgcacgcggctcacctttcttaaaaaacaacacttgaattaaaaagccaatagcaacaattacaaaaacaagattaatcagatttgtgccatttcgccaaaattcgcgacctaagacattaccgttaacaattgctggataaacgttagcgcttagcaatagtaaaacgattgcagcccagaatctgtagtatttgtagaaaacaaaattaatcataaccaatcactcctaaatgtcttacttatatttgcaatttataataggtgtcttatcagataaatacaaccttcttaagtaaaaaactagtctgtattttccagacatgcaattaacccgctcatgctgggcatttagcacagtataaccatcagtctgatgcagtgagcatgatttttgtggataacgcttattcattcaaaatctatgcgccaaacgctataccgtttgctgaaacgttatggtactagaagtagttatcactaaccagtatccgagttagtcacactacgatgctaattaccagtcacaggttcaacgataccgcaacctcagcggtatcgttttttcaaatattcagcatttttcgacgttcgtacgttaaattaagacattaacgcacattgcagcacacataacgtcattcattatataatttaagtaatatttattaattcagataatctggttcacttcattcttagctaaccacctaggaggcacttacatgagcatcatcaatcgcgttatcggtatcattatcacgcttatcttgttatgccaatggttgcttggctatcaattaccagctgccatggcgttcttcttagtggcctggctgattggcttggtaacgatgtggctgttgccagactcgacgaccgctaaccgctagtcgtgtcagagggatacaaaatcaactcattctaaaacacgtcacaaggccattacaacttgctcttgcgacgtttttttgctaacttcactattacctagaaaacggttagactggttctacacgccagcatcaccgaccattcaaatatgtttttgccgcttaccctcattgtgaacttgcgcttcatattgcgttggaactaataatcacacttcccataaccactccggatcaaagcacccaccttgcttacattcacacattgatactcacaaaaatacgccggcataagcaaataaaaaaaggccagcatccgccagcctcattctacttaattcaatttaatcaatcccgccgccaacaaaaacatgtgggtgacgactggtccaacgaaggtcaaaccatgtcggtgtaaatccttcgcaacacgggcgcccaggggtgagcgcgtcggtaattcatcatcgggcgccggcataatgattggtgtcgcatcgacaaacgcccacaggtagttgctaaagctaccatactcggcctgtaattgttgaatagcacgcgcatcttgaatgattgcacgtaacttacgaccattgtgcatcactttgggagtcaacatcagccgttcaaaatccggttcgtccagggcggctacggcatctacccgcagacccgccatatgttgccgcaatactggtaactgactagccgcgacccgccagcctaaacccacttgtaagattccaaccactaacaattcaaataaaacgtgatcatcgtacgtgggagtaccgaaataagcatcatagtccttaaccccattcgccgtaatatcgtcaaaatcatccggactaatcattattcgataaccaatagccattctcaattcggcctaacagcgtaatcaattgcttggtttcagccacatcgtggacccggatgatccggccacccttaagcatcatcgctgcttcagtgaccaacgtcattggtagccggtcttccttcttcagaccaagcaatagacctaaataacctttccgtgaaatggccaccatcattgggcgtcgcaaataattaaattcatcaatgttacgcatcatcacgtaatcctgttccccatgtgcgacttgtgaatagccgattccctgatctagagcaattcgttcaatatcgatgccatgactcgtcaatgctgccagattttgttcaaagaaaccacgcatactgctcgtcagatcggtatattcttggtcacgactactgtgcatagtcagtaagccgacgcgactgtcagccatcaatttgagcttgcgagggtcgtccgtaaaggcgttcacatcgttaataatgctgacaccttcttccaggacggcttgcatgacatcatacttataagtatcgaccgctaagactgcttccgggaaacgagccttgatggcgcgaatgtacggcaacgtccggtctaattcaacttgcggcgtgacttccgtgaagcccggccgtgtcgtttgaccattaacttcgattacgtcagctcctgcttgtaacatggcatccacgtgattcagtacgtcatctttagtcttgtactggccaccgtcgaaaaaggagtccggcgtaatattcatgatgccataaatcatcggcttcttggtgagattaaaccggtgctcacccgcttgccaaaaaacatcatattgtttcataatttgagtcaattgaatttgagtcgttgcttgatccgtaaagactcgcgaccattggtgtgttaactggcgaccagctgtctggttcagcaagacggtcaactgttcaggactcgcctgcacgaccccatctaattgctgacatagttgggttaatcggagctgctgctcccgattataatcactaaaacgcaaaactaattgttgttgtcgttgaacttgggcattcaacgcctgactcgcaaaatccgttgcttgtgctaatgaactggtgatatcttgtactaacatctactccaccgatccttccaatttttaaagttttgtgattaattttaaggcggcccgtccccggtgtgtcagcgggatgcgccacgttgctgataattcggccaaagttcgaccatagcgcggtagccagaaaattcggtcaaatcccccagaatagcgtccaaattgataggacgcaatgtagccggtgatcgaagcttgtacggccaagatccgcccatctggccaggcagccgctaacgtagcacgcatcaacgcttgccgctcgttgtcagggatatcgcgtagggccgttaaaatttcctgattgcaatcaaagccactgactgcaacccctaagtcgcgcgccgtggtcacacctaacaagtctggtaacgcggaaatctctaagccactatcatctgcgataaccggaacccctagctgttgcgccccaaaacgagctttagcaaccgcgttatcgacatagctcgtcgtcgtttccacgggaaattcgagccgcggcgccactgtcaagtactgacgagcagtcaagccatagtaagccaaacacgcgatcaagtcgcggcttttaccagcgttgttggatgcaatcaaccaagtcgtcgtcattggcttaaccccggccaaccagcctgttggagctcacgaatgacataaaatgaccccgttacaataatcgcactattactggttgcttgctgctgagcttgcgttaacgcatccgtgatcgtcgttgcagtcaataagtctggctgtcgttgcatcgcagccgtggtcataaaggtgggcgttaataatgcgttcgccgtgtcggccagcttagtcgcggataacgctcgttctggatttgcgggcgtattcgtaatcaggacgtcagctaccggtaatagttcagccagcattttagggtaggccttatcttgtaagaccccgacgatccaaatcaatttacgaccagcgagtaattgcttcacacttgccactagtgccgccataccatccggattatgcgccccatcggcaataatgacaggttgctcctgtaatacggtcaaccggcctggcaaggaaacttgttgcaagcctcggcgaaccgcactgttcgtcaagttaacttgttgctgttgtagtactgcaaccacagttaaaaccaaccgcagattttgtagctgataggtgccactcagtccgaccgttaattgcgtccaatcaaaaagctgactgtgcgcatcaacgacggtttgcgtgagtgtttgcccagtcaccgtcagttgcgcgtgcttagcggtcactagccgaacaccttgattgagcgcttcggtctgcaaaacagccagggcttctgggtgttggtcagccaatgtcactgctgttgtatggggcttgatgatttttgacttattttgcgcaatcgcggtaatcgtgggcccaagaatggcggtatgatcgagggcaatcttagtaaataccgtgagttggggactggctaaggcgttagtcgcatcatacaagccgcccaaaccggcttcaatgaccgcccattgcacgttttgattccgaaaccaaacgacactaatgagaaagaaccattcaaagatggagacatcgctagctgtcagtcccatattttgcagaaccggtagaatctcacgatacgtatcgataaattccgctggactgatccacgtcccattgcattgcagttgttcacgcgcatcattaatcgcggggctgctgaagcggccaacttgatacccttgcgcccgcaggatactggctaacatggctcccgtagagcctttgccattagtcccagcgatatggatcacatggtaataatggtcagggtggccaagatgtgccatgatgcgccgtaataacggaacacgctgatgattattggctaacatggcttgatttagttgggctaataagtcctgataacgttgttcaatcgtccctgtatccacttaatcacctactttgcgattcgctgtaagaattctcgtttcaagtctaaatccgtcttgaattgaccactgtaatagctactttccgtatgcacacccggtttgctaacaccccgcatctccatgcacatgtgccgcgccgtgattgagaccgcgatcccagccgggtcaagaattcgttgtaattctgttgcaatggaaactgtcaaccgctcctgaacgttcggctgttgactgcaatagtcaatcaagcgaggaatcttactcaagccaatcacttgttcatgctgcggcacataagcaacttgaaccgtgccaaaaaacggcaaaaggtgatgctcacacatcgaatagaatggaatatccttaagtaataccatttcagtcggatgctcaaccttgaacagtttataattatcaaatggtgcggcagtcttagtagcgaaaacttccgcatacattcgtgcaacccgtgctggtgtttctactaatcccggtcggtcaggatcttcaccaactgcacttaaaatttctcgtactgcatgctcaatctttgcttggttcttctcatcaatcatctaactcactcacatttcttacttttttaatccaactctgatcctgattagccgcaatcaattgggccacttgtggtccaactaacacatcagttttggcgatttcagcagttggcagtagcacaaagttgcgcttagctgcctgcgcatgcggaatcgtcagcgtcgctgtgttgatttgccggtcgccccaaaaaataatatccaaatcaatcgtacgtggtccccagtgaaccaagcgttggcggtggcccgcctgctcaattgtatgtaattcatccaatagttcttctggtgtcaaattagtcgttaaggataccgaaacattgtaaaaattggcctgatcacgctttccccacggttgagtctcataccaatgagattcgtcaatcacgtttaccccattgacggctcgtaatcggctaagggcttgctgaatattttggacgcgcggatgaatattggaaccaacactcaaataaacccgttcttccctacttgccattcggcgtcccctccacctcaatttccacatcatcaaagattccaggcattggtacgctatatttacgaattttaatattgattgcatccgccgcgggaaaacttgtcaataacgtctgcaataagtggttagctagcgattcaatcaacttgtatgaatgggtcgttacaaattcatcgaccacgttacggaccgccgcgtaattgatggtctcgtgaacgtcatcgtgttgaaccttggtttcgataggatatttaatggcaatatctagccctagttgttgaccattacgccgttcttccggaagtaccccgttaaacgtgtgaaagcgtaaattattaattcgaatcatgcccataagtatcccagcctctttcttgctcatttttacttataatcatagcatgaaggacgctcaatatgatagtaatcagccaaataaccccataaaaactagcaatcgttcgggaaccgaaaaaagtgcgttgctaacaaaccggttcatcaaaaaagacgttgctggtcaaaaaaccagtaacgcctttgtcttagtttaaagcagtcgtacccccaccatgaactctaggaatccgtagtcgtcccatcattaaaattaatcaaattactgaggtaatggctagttagaccaggtgtctgcttcacaatataggtggcgagcggtgactgcgtcatttgcgtctgaataaagctcgtattgacgatgttcgccaacgacaacgcgacaaaaataaccagatacgtcacgacaaatgacacgattccacccgcaacactgttcacttgcttaataactggtagccacgtaatgctacgtgaaacacggcctaacaaccgaatcactgaccaccctaacgaaattaacacgaagaaagcgaccaggttaatgatcaacgttgccgccactgaagcttcaattaaatgtaaattcgtcaatagattactaatcattgtccctaacggctgatagagtagtcgtgcaaacaataggacgacgaccgtcccaatcagatgcaacatttcaatcacaaatccgcggtgaaacccgcgaaaaattgcgcttgctagtaaaattaaaatcacaatcgtaaatatcatctgcgtgccccgccttccgcttttcaggtacgcctattttaccagctttcgtcagtcagtgcagtgttttcacctagtctaaaccttatcttaaagacttgacgacgaccgtttctttcggtaaagttaacagtaatggttacgatttaaagagaatggggttacaatacatggtcaaccgacggatatggctttatttggcaataatactgggactcagcggcctattagcaggctgtcaaagttcgagcacccccagtaaaacgactaacgacaaaattaatatcatggctagtctcgacttttatggtcaaacggctaaggcggtggcaggaaagtatggtcaagtgacctcgattattgatcgaccgagcgttgacccccacgactacgagccgaccgtcaacacggctaagcaggctagtagcgcccaattaatcatttacaacggcctcggctacgatgactggatggaaaagcttactgtcaacaaagccaagggcgcccgggtaatcacagtgggaaccgacgtggctcataaaactgacggggccaacgaacacgtctggtacgatcccacaacgatgcccaaattagcaactaaaatcgcaacagaactcagcaaaattcagccgcagcacaagcattattttgaacagcaggcccaaaagtatcagaccaacgctaagaccataaccactatgatcaaacaattgaaacagcatgcaaataatcagcgtgtcgctgtcagtgagccggtctttgactactcattgaaggcaatcggctaccgaatcagcaatacgcatttcgcacatgcaattgaagagggttccgacccatcacctaaggatatccagcaaatgcaacaagacatcaagcaccaccggattgcctttttcgttgaaaacactcagaccgatagtaacttggtcacgaacatggtcaaactcgccaggaaatacgatgtgccggtactgaaggtcaccgaaacgttaccggccaaccagacgtatcaaagctggatgctcagtcaatatcgtcaattggcaaagattcaaaaagcaacagccaagtagaagcgccccggttagttgggccaagtcctgtgattcagtacgatcacagtcgtgccacgaaaaaagggccgccattcttgtaatcaagaatggcggcccttttggcctaattacgactaaccgaccgattgtgcaggcactaatgtctaattagtggcgttcaaagcatatcccacttaacttcagtcattctcgcctggtagtcagtcaccgtgattattaatgcgactgcttgcgcccatcacgcaaaagtaacgcaagcacgaggccaaccaattcaatgccgagcatcatccagaagaccgtatggtacccttgcaagttcgcacgcaacgttgagactcccgcttgtttctgagcaaacgtcacgttggataagaccaaggtcgccacggccacaccagctgaaccgagaatttgacgaaccgtcgtaatcacagcggtaccgtgtgaaatcagttcatcgggtaatgaattagcccccaatgtgacggcgggcatcatgacaaaggcattcccgccttcaattaaggcagccagcaaaatcatggtgagcaggttcaactctgaattgatcagtgctaagatcagccaaccaacaacgatcatactcataccaagtaacatgatttgtttgtatccaatcttctctgctagtttcccagtaagtgggttcaaaatacttagaagcaccgcaccaggcaccagtgacatgcctgaaacgaatggcgacaccttcaagacaccctggtaatagagtgggaagatgattgttacgacaatcagcgccacgtacgagattgctgttaggaaaatggctaagtcataattaaatgtttttaagacccgtagttccaataacggcgtctccaagtgaaattggcgataagtaaagtaagccaccgctagtactgaaaccgctaataacagccaaccgaacgtccagttcacattgggtttaccaatctcattcacgacgtataaaatcccagcaaagcccagtaacgtcacgattgagagcaaatctagctttgaaggcttattgaccatcacgtccttgatcgttgtgaaactaattaggatcaacaaagttgccaccgtgatgaagacggcaaacaatccgtgccaatcggtaaacttcaaaaccacaccggaaataatcgggccagatgctaatgctgatcccatgaccaacccggcgacacccatcgtactaccccgtttttcctcgggcgtaatcgtcagtaaaatggattgatacgagggaaacagcacgccaactgccgccgctttaattaggcgaccgaccatcatcacaccaaaactgggtgcgaaataaataatgattgaaccaatatcgaaaagcaccaaaacggctaagaataatttcttaaacccaatattattcaacaaccacggactgattggcatcatgacgaccattgtcaacataaagccggtcgttaaccattgcacggttgaggccgagatgccaaagtcgcgcataaatgttgggtagaccgtcgacaaggaagactgactgatcgacatggtccaagtcccaagcaacagcgtaaaaatgaaccagaagcgtcgacgccccgtcaacgttacattttgattagctgtctgcattcaaaactcctccttactttagaacagttatcaactactaatatccattgtaccattgaaaccaatgatgtacaggctaaaagtcagattgccaacaaaaaagtttgctacaccgaataaagagacgtgcacaattagcttgtaacaacacccgcgtgaatgattgttaaatatccaatctgttaaagctctaacggacagattcattaagtcagttggcctctaatcatcataaaatcagtcccaaccagggcactccatcacaccgaaaatctttgcagccaaactaaaaatgggttgttcaagaatcaaattcttgaacaacccattacctacatgttgcatcgatattcttaatttattcagctaacatggccgcactaactgcctgtagctgcttcgcttcaccagcagtcggtttagcgggtttcatcttctttaaggcgatcactgcccgatattgaagttctgccacattaatatcatcccgcaaatcataatgagtaattgtgacgaaggcggagttctcgtaaattttttcaactttagcataaaaatcataatcggtattgccgttcttttgacatttaacccgatcccccacagaaatctgagccataactatcactccacttcataaaatatgataataacatagcacgtaactgctagaataacaattattgctcccgaatttacatgatttttacatggttatgacggatactgtccaaattaaatgacattaggcccacgagcccgtattagcggttagtaatggccaagttcgtaaaccaatacctagtaccttagactgagctgaatcactttatcgcttgaaactagcatcgatttttctaaccaaccaaacgtacgccatttacgcctgactctcaaaatccgaacgctactgtctctcgttttgacagctcccccatcactgccagctacccccaatatgagcattgagcgcaatcgctaacgattcaactcaacggaaacttattcagtacaatgagcgtgattgcaaccaataagtagatcgtgccggtgattaatagtataggttgaattcccaatgcgctgatgagtaccgggattcctaataatccgacccgccgtttgaatttcaaaatttagtcttagttcgcccagtagactaatttttggcaacaaaaaaggaatcgaattaacgattccttaggttgcatggcaacgtcctaccctcgcagggagcgatcccccaactactctcggcgctaagaagcttaacttctgtgttcgacatgggaacaggtgtatccttctcgccatcgtcaccacactattgagaaacttgtgctctcaaaactagacaatatcaaatatcttcatatgaaccggaacaccaattacttggttaagtcctcgaccgattagtattagtccgcttcatgcgtcaccgcactgccacttctaacctatctacctgatcatctttcaggggtcttacttccataaaggaatgggaaatctcatctcgaggtgtgtttcacacttagatgctttcagcgtttatcacatccatacgtagctacccagcgatgcgcctggcggcacaactggtacaccagaggtatgtccatcccggtcctctcgtactaaggacaggtcctctcaaatttcctacgcccgcgacggatagggaccgaactgtctcacgacgttctgaacccagctcgcgtaccgctttaatgggcgaacagcccaacccttgggaccgactacagccccaggatgcgatgagccgacatcgaggtgccaaacctccccgtcgatgtggactcttgggggagataagcctgttatccccagggtagcttttatccgttgagcgatggcccttccatacggtaccaccggatcactaagcccgactttcgtccctgctcgacctgtctgtctcgcagtcaagctcccttgtgcctttacactctgcgaatgatttccaaccattctgagggaacctttgggcgcctccgttactttttaggaggcgaccgccccagtcaaactgcccacctgacactgtctcccaccacgattagtggtgcgggttagagtggtcatacagcgagggtagtatcccaccaacgcctccaccgaaactagcgttccggtttctatggctcctacctatcctgtacaagctgtacaaacactcaatatcaagctacagtaaagctccatggggtctttccgtcctgtcgcgggtagtccgcatcttcacggacaatataatttcaccgagtctctcgttgagacagtgcccagatcgttacgcctttcgtgcgggtcggaacttacccgacaaggaatttcgctaccttaggaccgttatagttacggccgccgtttactggggcttcaattctgagcttcgccgaagctaacccatccttttaaccttccagcaccgggcaggcgtcagcccctatacgtcatcttacgattttgcagagacctgtgtttttgataaacagtcgcctgggcctattcactgcggctgatcttgcgatcagcaccccttctcccgaagttacggggtcattttgccgagttccttaacgagagttcactcgctcaccttaggattctctcctcgactacctgtgtcggtttgcggtacgggtagttaagtactcactagaagcttttctcggcagtgtgacatcagacgcttcgctactaaatttcgctccccatcacagcttgtccttaaagtgaaaagcatttgactcttcacaagacttactgcttggacattctaatccaacagaatgcacatcttagcctcctgcgtccctccattgctcaaacgcacttaactagtacaggaatctcaacctgttatccatcgtctacgcctctcggcctcgacttaggtcccgactaaccctgggaggacgagccttccccaggaaaccttagtcattcggtggataggattctcacctatctttcgctactcataccggcattctcacttctaagcgctccacaagtcctcacgatcttgcttcaccgcccttagaacgctctcctatcacgcgacctaatggtcgcatccatggtttcggtagtatgcttagccccggtacattttcggcgcaggatcactcgactagtgagctattacgcactctttaaatggtggctgcttctgagccaacatcctagttgtctatgcaactccacatccttttccacttagcatacatttagggaccttaactgatggtctgggctgttcccctttcgacggtggatcttatcactcatcgtctgactcccggatatgaatcaatggcattcggagtttatctgaattcagtaacccaagacgggcccctagtccaaatagtgctctacctccatgatcctaattccgaggctagccctaaagctatttcggagagaaccagctatctccaagttcgtttggaatttcaccgctatccacacctcatcccagcaattttcaacttacacgggttcggtcctccagtgcgttttaccgcaccttcaacctggacatggataggtcacctggtttcgggtctataacctcgtactcaaaacgcccatttcagactcgctttcgctacggctccgactttttagtcttaaccttgcacgggatcataactcgccggttcattctacaaaaggcacgccatcacgcattaacgcgctctgacttattgtaggcacatggtttcaggaactatttcactcccctcccggggtgcttttcacctttccctcacggtactggttcactatcggtcactaggtagtatttagccttgggagatggtcctcccggattccgacggaatttcacgtgttccgccgtactcaggatcctgaactgagagaatttgatttaatctactgggctatcaccatctatggcggattttcccaaatccttcgactatcaagttctttggtaactcaaatgttcagtcctacaaccccaaagtgcaagcactttggtttgggctgttccccgttcgctcgccgctacttagggaatcgaaatttctttatattcctgctgctaatgagatgtttcagttcacagcgtttacctccaactagactatgaattcatctagtggtaacagttgattaaaactgctgggttgccccattcggaaatctccggatcatagcttacgtacagctccccgaagcatatcggtgttagtcccgtccttcatcggctcctagtgccaaggcattcaccatgcgcccttgttaacttaacctcatttacctaacggtaaatgcgattaatgagtttagcgataattaaacttcaataaaaaactcaaaaaacgcggtgttctcggtttcattatgaaaaaatatatttgatattatctagttttcaaagaacaagttttgagagttaaatctctcaaaactaaacaaagtttcgacgcgtgtgtaggtttccgtaatattccttagaaaggaggtgatccagccgcaggttctcctacggctaccttgttacgacttcaccctaatcatctgtcccaccttaggcggctggttcctaaaaggttaccccaccgactttgggtgttacaaactctcatggtgtgacgggcggtgtgtacaaggcccgggaacgtattcaccgcggcatgctgatccgcgattactagcgattccgacttcatgtaggcgagttgcagcctacaatccgaactgagaatggctttaagagattagcttactctcgcgagttcgcaactcgttgtaccatccattgtagcacgtgtgtagcccaggtcataaggggcatgatgatttgacgtcatccccaccttcctccggtttgtcaccggcagtctcaccagagtgcccaacttaatgctggcaactgataataagggttgcgctcgttgcgggacttaacccaacatctcacgacacgagctgacgacaaccatgcaccacctgtatccatgtccccgaagggaacgtctaatctcttagatttgcatagtatgtcaagacctggtaaggttcttcgcgtagcttcgaattaaaccacatgctccaccgcttgtgcgggcccccgtcaattcctttgagtttcagccttgcggccgtactccccaggcggaatgcttaatgcgttagctgcagcactgaagggcggaaaccctccaacacttagcattcatcgtttacggtatggactaccagggtatctaatcctgtttgctacccatactttcgagcctcagcgtcagttacagaccagacagccgccttcgccactggtgttcttccatatatctacgcatttcaccgctacacatggagttccactgtcctcttctgcactcaagtttcccagtttccgatgcacttcttcggttgagccgaaggctttcacatcagacttaaaaaaccgcctgcgctcgctttacgcccaataaatccggacaacgcttgccacctacgtattaccgcggctgctggcacgtagttagccgtggctttctggttaaataccgtcaatacctgaacagttactctcagatatgttcttctttaacaacagagttttacgagccgaaacccttcttcactcacgcggcgttgctccatcagactttcgtccattgtggaagattccctactgctgcctcccgtaggagtttgggccgtgtctcagtcccaatgtggccgattaccctctcaggtcggctacgtatcattgccatggtgagccgttaccccaccatctagctaatacgccgcgggaccatccaaaagtgatagccgaagccatctttcaagctcggaccatgcggtccaagttgttatgcggtattagcatctgtttccaggtgttatcccccgcttctgggcaggtttcccacgtgttactcaccagttcgccactcactcaaatgtaaatcatgatgcaagcaccaatcaataccagagttcgttcgacttgcatgtattaggcacgccgccagcgttcgtcctgagccaggatcaaactctcaaattaatgatgagttctaaaaagctcatttaatgttgtactaaaatttatttgctagcgaattgacttcgcaaatgttttgctctcgattcaaaatcaagagaccctacacatttgattcgtcgaaactttgttcagttttcaaagatctaattccgtgtgttaatcgcttaacacaacttaatcatcataacatcttaatcaatatcttgtcaacaactttttttaagaagtaacttgattaatttgtcatagttgccgttgcgacaacagaagctatcttaccaattactgaagaaattgtcaacaactaatttcaataattatttggtggtgagatgcatctgccgtagcagcaacgtttactaatataccaattgaagtaaaaagtgtcaacactttttctgaatttctttttattaatagtcaaaccagctttctttctctatactatttaattaaaggagcgactaaattatgctagcttggctaccattctttttgatttcattaatgtttattgttctactatacgcttgtgcgcgatcagcgcgcacaaatatccagcgttttaagcaactcagtttaattgcctttctctgggtcttaactgctttttgctatacacctaccagttacaattttggtacccaactcgttattcaatatattcaatggggacccgttaagctgaacgtgattcctttccaacaacttgacattgaattttggctcaacgttctcctcactgttccattgggcggtttactggcatggaattttcccgacttgccttggcgtcgttttatttggttgggatttcttacggggctaacactcgagctgggacaattcatccttgactggttggttaacctcaaacgttgggttgatatcgatgatgtcatcacaaattgggctggtgtcattatcggtgccgctggttataaaattgcacgtcatgttcccggacttcgctggttgcaaaaataacgtatatatagaagcaaaaagcaaaacaacgtttgtttagcacccacaagtgccaaacacttcagcgctctagctgttatgaaatcgtaattaaataagcgtcgcagccacttaaggttgcgacgcttatttaatttaactactaactattaatgaagctgccatcatcaggattcaaaaaacagatcgaatactcgcttacgatcttggttccagacttgattgtcactagttggataaactcgatttgttaacacaaccagcccaatttgacgatccaaatcaaaagcaactgccgggccagtaaaaccagtatggaaatattgatgtcgtcccgcacgtcgttcccaacctaacgtccggccattttcgtcatactcgcctaaccagtcaaagacattttcatccagcacccgtttgccttgatattcaccaaagtttaacatcatttcaataaatacggataaatccgtcagcgttgagaacaagcctgcgtgaccactctcaccattcaacaaaaaggctttataatcatgcacctgtccttgaatctgaccccgccgcggatcaaactccgtcggcacaaaccgaatcttcggacgatttaagttataacccgtattggtcatcgctagtggatagcaaacgtggtcttgaatactccgagccaatgagccgtcaaccgcacgaataatccatcccaataaaataaatcccaggtctgaatagacatacgttgtccctggcgccgtgacgagtggcgcatcataaaccgctttgatcagatcttcacgttgcatcttatccaggttatcaatatctgccggtaacccactattatgaagtaacaagtttttaatcgttatttcaggatgagtgaacccaggtaaaaaccgggcaaccgagtccgttaaatgaatcgtgtggtccgataacaactgaaaaatcctcgtcgtggtccctacaaccttagttaccgatgctaggtcataaatcatcgcaggatctaagcccacggcaaactcatcgcggccctgcttaccatgatagtattgattgatacctttaggggtgatcaagctaaacgacgccccataaatgtcgccagcttcaatacaactgtcaatatattgttcaattttttcgagcatccgcattacgcccacctttcactacattcactagtttctgcttatcttctttatgataacgaacttcctcataaaatcaacggcaaacgcttttaacaccctccacacctcgttgcactttttattaattaactagttaaacacttgttacattatggacaatattccacttatatatcaaaacaagtcttgtttttagccgttttctaaatataattaagtgaattaccaatgcctatctagctatgtaagtactgttatatcaacgttaatagtcaacttttcaataatagattgcaaaaaaataacccaaacgtgaaataaatcacctgaaagcggttacaaatccagcaaaaaatgttatgattcaaatatagaattttatcaatcatttgattggattcaaattatggaggcgagaaaatgattacatcagaaaagacaacaaaaccagcagcttggaaaggtttcaaaggcgggcactggcaggaagaaatcaacattcgtgattttattcaaaataacttcacacagtacaatggcgacgaaagcttcctggccggaccaacagccgctactaagaccttgaatgacaaagtcttagaattaaagaaacaagaacgtgccgctggtggtgtgttggatgctgatactaaagtcgttgcaacgattacttcacacggccctggttatattcaaaaagatctcgaaaagattgttggtctccagactgacaagcctttgaagcgggccttcatgccatttggtggtattcgaatggctgatgacgctttgaaatcatacggttatacccctgatgaagaaaacgacaagattttcactgaatatcgcaagactcataaccaaggcgtcttcgatgtttatactcctgacatgcggaaagcacgtcactacaagatcatcaccggactaccagatgcatacgcacgtggccgtctcattcctgatcttccacgggtcgctgtttatgggatcgatcgtttaatggaagacaaagctaatgactttgcccacattggtgatggtgaattgactgatgatgttattcgcctccgtgaagaagttcaagatcaataccgtgctttagcagatatgaagaagatggctgccagttatggctacgatattagcaagcctgcaactaatgctcaagaagctattcaatggatgtacttcgcttacttagctgctatcaagacccaaaacggcgctgcaatgtccgttggccggattgatacaacgatggacatcttcatccaacgtgacttggacaatggtgttctggacgaaagccaagctcaagaattaattgatcaattcgtcatgaaactacggatggttcggttcatccgtactgaagaatacaattctctcttctctggtgacccaatctgggcaaccttatcaatgtgtggtttaggcgtcgacggtcaacaccatgtgactaagaccgctttccggattttaaagactttggacaacatgggcgccgcaccagaaccaaacatcacgattttatggtcagaccgcttaccagaagacttcaaacgttacgcaactgaagtttcaatcgacagttcaaccattcagtatgaaaatgatgacttgatgcgggtacaatggggtaccgattattatggcattgcttgctgtgtttccgcacaaccaattgctgatggaatccagtacttcggtgcccgggcaaacttagccaaagcgattctttatgccatcaatggtggccgcgacgaaattgctggagatcaagttggccctgcttacgaaccaattacttcagaatacatcgattacgacgaattcatgaagaaattagacaagcaaatggattggttagctgacacttacgtgaactcactgaatgcaattcattatatgcatgataagtactactatgaagctgcccaattagctttgaagaatactgatcttgatcggacctttgcaactgggatttctggcttatcacatgccgcggattcaatctcagctatcaagtatggtcacgttaaagtaattcgtgacgaacgtggtatcgccgttgacttcaaagccgacaatgactacccacgttatgggaacaatgacgatcgcgctgatgacattgctaaatggttagtcaaagaattatacagcaagatgaacacgcatcacctctatcggaatgccaaactttcaacttctgttttgacgattacctccaacgttgtttatggtaagaacactggtaccacaccaaatggccgtcaaaaaggcgaaccattctcaccaggtgctaaccctgcatacggtgctgaaaagagtggtgcattagcttcacttctttcaactgccaaattaccataccgttacgcaactgacgggatttccaacacgttcggcgttacccctaacacgttaggccatgacctcgaatcacggaaagacacgttagtaaacatgttagacggttacatgaagaacgatgggatgcacttgaacatcaacgtcttcaataaagacactttgattgatgctcagaaacaccctgaagaatacccaacattaacggttcgggtttctggctactgtgtctacttcgcagatttaaccaaggaacaacaagatgacgttatttcacggacattcttcgaatcaatgtaacatttaatctttaatagttaagaaggcgaaaggctcatggaaaacaaacaagtttcaacaacgcaagcggcggcaaaagagcctttgataggctacgttcactccatcgaaacgtttggctccgttgacggaccaggtatccgttacgtggcattccttcaaggatgccacatgcgttgccaatactgtcacaaccctgatacttggaaactcaacgttggcgatcaaatgacggccgacgagattctcgaagacgcggctaaataccgggctttctggggcaagacgggtggcatcacagtcagtggtggtgaatcactggtacaaatcgacttcatcttagacttattcgaaaaagccaaggcgatgaatatcagtacttgtctggatacctctggacagccttttacccgagaacaacctttctttgacaagttcgaacgtctaatgaaggtcacggacatttcgttggtcgacattaagcacatcgattctgccaaacacaagcagttgacccagtatgggaacgaaaatatcttggatatgattcagtacatggcccaacaccacgatgatatgtggattcgtcacgtcctggttccccaacggactgattacgatgaagacttgaagaaactcggcgattacattgctaagattccaaacgacgtcgttcaaaaagtcgaagtattgccgtaccatactttgggcgttaaaaaatatcatgaaatgaagatcaagtaccggcttgaaggaatcgagtctccaacccaagatcgggtggcaaatgccgaaaagctactgcacactgctgattacaacgggtacaagacatggatgccattgccaaaactttaaatcggcatttctagcatgactaaaacaccagcgttacaatcgtctacggatggttgtgtcactggtgtttttttgctggctcgacgcatgcacgtattgctggccggaattagtacagtggcacgcaaaaaaggcgccgcgagcaaaccagcaacgtctttccttaatcatgccctatccaatgaccgtcagcccttggactggctgcgaacaggccggccactaactatgaatgcctagttccattcgagcttcgcgggacatcatactttcgttccaagcaggttcccacacaatctcaatctcgatattgttaacttctggtaatttgatcagttcatcgtgaatgtccttagccaaccattcggtcaaaggacagcccgcaatggtcaacgtcatggtaatttcagcggttccttccgccgtcaattgtgcatcatagatcaaccctaagttaactagatcaattcctaattcagggtcaatgacatgtcctagcgcctcgaaggcccggtctttaaacgttgttgtcatcgtatctcgtccttccataccagcttgaattcactgattaatcacgccaacgtttcgcggtataagtgccaccacacttgatacacgtcatcgttatataaagcgctttcttgtctacttctattgtaccgtatgtcagcccatattcaatcaattattagcgctaattagccgacttttcaaacgatcggtcaatcagcaaatcatgcgactatttctcgaaaaaatttactataatccccgatatagcagcgttttgagtcactattgatttttattgcgaattcgcggttgtttttgttgtaagcgtttgcggtttatgctattatactaagtgaggaaaggaattaatcctcgattagcaaagcttctcaaaagagtttggctgtcgctgtaatgttagacagctagtatcacagtttgggtcgttatcgaaaccgttttaagcgccgtgaagcgttatcggtctagcgagtgtcgtgagatttacgttggatgactgaacgttgacccttagataaacgataaccgcaaagaattaattggcattagaatgacgaacagattttaactaagttttagttggaaacaggtgtctccgatgaccagttgttagttccacattaccagttccatttgtagactcaggtattacaaagtttaaacggaggtgcatgtctgttacgaagacattcccaagttttaaacgcgagtttgactttcgttaaaacccgtctaacgagtcgcaatcaagtaacaaccttactttagatcgactatagcagatagttacaataaatacgggttagtccgttagaagttggacacgcgtaaaattgaatagcatgaaggtgtatcatattaacactgaacaatttttcattgctaatcaggattattcctcataagtagaactcaagcagagaagccttgggttctatttttttgctctaaaatcagatttaccaacagtcggcaccagacgtaaccgtttacatcctcttacgaaaaccgtatactgaatttaaatcaagttgcacattgaggaggactttagttttgaaaacgattaatttaggtcacagcaatattcaagcttccagcgtggcacttggcatcatgcgcatggacgctttggacgtcgcccaagccaccaaggttatcgataccgctgctgatttaggcatcaattacgttgattcagctgatatctacggtggtggtcaatcatcgaccatcttcggtcaagcactcaagcaggctcacgtatcgcgtgatcagctctatattcagtcaaaaggcggcattgttcctggcaagcgttacgacttttccaaacagcacatactggcagccgtggatggcgagcttcaacgcttaggtgttgattatctcgacaccttcctcctccatcgaccggacgccctgatggaacccgaagaagttgctgccgcttttgacaagttgcaaactagcggcaaggtgcgccactttggcgtctctaacttcaatcccatgcaagttgacatgcttcaagcggcactaaaccaacggctcatcatcaaccaactccaatttggtatcatgcataccggtgcgatcgactttggcttgcacacgaacatgcaggacgaacgtagtcttaaccacgacggcgagatgatcgaatactcacggctccataagatgacgattcaagcttggtcgccttatcaatacggtaacttcgcgggtatcttcttagacaatccgaagtttccagaacttaataatgccatgcaagcactcgccgatgagaaacaggtcactaaatcagctattgcgaccgcatggattctccggcacccagcccacttccaagtcatccttggtacgatgaatccggaacatctagctcaaaatgctgctggagcagacgttacgctttctcggcaagaatggtacgacatttactttgcagctggcaacgatttaccttaatcacgatcgacctaacagaattgacgattagtttttacaatcaaaacgacgaccccaaatcaggattgattttcaggtcgtcgttttttagacgtttcactaacatttttgatgtactcaccacatctacgcgtatacttaatcttaccaagactcaggaggcgagcgaatgacatccacttgcacgatctgtgaacgaatcaaactaattcaggcacatcagaatccttatttcgtttacgaactcacaacgggctacgtggtccttgctgatagccagtactttgaaggctacacgctctttttagccaaacatcacgttaccgaattacatcatttaccggcacacgagaagttacgataacttgaagagatgagtatcgtccaggaagcttgtgcgcaggcctttcatgcagacaaaatgaacattgaactactcgggaatggtgatgcgcatgttcattggcacttatttcctcgccataacggtgatacgcccaaccccggtcccgtctggtggacaccgctggaaacaatttatggtgatgatgtcagtctagacattccccgtttaagccggttgaagcgcacgctcagcgtagcaattgaggccacgcttaatgctcgggaagcagaattgcaggctttagaggcactcacaaggcctgctagccacagaattgacagcaattagaccaaatcaggacccagacccgcttagatcttggtggctacaccccaattcttaatcgcaatccgtcaccgtatttcaaattgccaaaatccacctatttatccggccgactatcatacgctcgcttagatttatagccagctcgaaaaaccgtcttcataacttcaatgtgccgttccttagttgcttgtgccttagttccaaaaataaagcgggcccattcgcgctgataaccaggtgtcaaagccacaaagaacgtttgcaattcagcatcaaccgctaacaattcggttaccgccggaatatttttttcaaatgaactgaggggtgctgtactcataatcaaacctccgattagttttacttaaatttactgtaagaaagggaaaatccctaattttcaggtttttatatttcgaattttcataaaattgcgctatcattatagtataagtattattatttgactactataattaaccatactgctattcaccaaggggagccctgctatgccaaaatttgatatcaccctcatcagtcccgaacgcgctaaagcgatgttgactgaatataaagaacaacgtaagaactctgtcccacatctggcccatcctggccgctatatcttgccggattacaaattaactcgtcgccgggccgcattcaaaattgttaaacatacctttttaacgccccactacaagtcttacgttgccatggactctgacaacggccacacactctggtttcataatttcggttccctaaccgaagctttattctggttagaaaccggccttaaaatcagcgataccgactcccattctaactacaaggaatggatggctaagcacactacggaaatcgaaaccttcaaagacttgctgcgcgagcagaagcataaacaagggcccaagactaagaaaaaagccaagtagcccgttttgacacctagattcagataagcagcagtacgctcattagcgtgctgctgcttttatttacgatcaactgtgccattcattactgactagaccaacctaaaagtggctatccaaaaacgactgcagcttgcgtacaatcacgcgatgaccggcattgttcggatgcaaagtatccaccgaataaatggccgcttgagcgggaatcgcaaatgtcattcccgcatcacggtacaagctcaaatgtgggacgccatagtctgcagtcatctgggcaatcgctgcttcataatctgactgacgatacccgagaccattagtcaccgcactaaaactgcccccaaaatcagagccaatatgaattgctgaaataaataacttcggcacggtcggccaattcgtctgtaatcccgtcagtaacatcattaacgcgccataaaatgtcgtcatatcgcaatcaccgtattgccctaacggctgatcccgaccatagtcattgacgcccccaaagacagcaataaaatcagcatcttcaggaatagcttgatagcgcaccgccatcgcatcgtagcgactcccaatcgttgaaccagagattcccaaattatcgctccgctcgacatcccaatcagccgccaaaatatcatgataatgcaccgtcgccaacccattattcgccgtaatcgaatctcccaaccacgccggccgcttaaaactaacatgcccattactaatcgccatagccaatcctccctttactatcatcgctatcattctaatccatcccacctgaattatggtagaaagatgcctttatttaaagtcaacagccaccagcttaggcccgctggaaacagttccggttagcgtaaacctgcttagttcgttcgtcctacgccgctctccaggcatttctgccaattgctggaacgcggtggacacagatttaagtcgaagaccacgtcttaaatactggtcttctactaaccaagccaaggacgcttgctaagtggaatttcaccgctgagcattggccgaaacgccttccattcgggacagtattcgaatggtggacgaagatatacccaacttttgatgaatttgtcattgttctccataaacagtaattttattaatcaactgttaggtcgaaaagatattgggatagctcgctatttcggaattactatagtaataatagaacacctcaacaaagtggttagggtaaccctaacgtctcgtttaaagttccggtatcaaaatagccaacgaccaattgtgccgagttaagtggccgttcatcagccattcgagcggcttaccgaaacgtgttcggtgccactaaagtctgtgcttgctatgccaacggacaaatgcccaaaccgcattaatccgttggctagacaatgctcggcttcaacccgtggcttgagactggaggggctgggtgacaatgctcagtagccaaattattcttagtcggaagtgatttccttccggcttagaataagactcgtatttgagatgacgcgggttatgcgttagctcaaatcgatgtcggctgcgttccagcaattgtcacccagccccggaggtcggaataggacgctcaccggctgacgaacagaaaaccaaccctaaaaggcatctttctaccattatttcaaacaggtgggccaatcttaaaaggctcgtattatggaaatccataatacgagcctagtttaattgatatatttagttcaactgagtagcgctaatcggcttccgtttcacgtttccgtgcagtacgccgttcgcgtgcgtagtcagttttagttgtgatttcaacgtcacgtgctagccgtttccggcgtgctaattcagctgctttggcattggctttcgcagcttccttgactggatcagtcgttaagtcgtgatggatcgagtacagtaagacgagcgcgacaatcgttaatgggaagccagacatcgcacagatggactgaatcgattcaaagccaccgaccgtgacaagccccaatgagaagactaggaagataacgacccagctcatccgattgaaacgacttggttgttcccccgcggccaactttttactagtaaatgacgaggtaatgaaggcaaatgaagataccgtcgttgctaagaaaataaagcaagataggcagtacaaagccagcataatcatcttcaatggtaaggtcgacaatactgctgcaatcacagcggcttgtccttgcgtatttaagatatgaactaagttaacgatgcccatccgttgcaagtataaggcataaccacccaagatggcgtagaaactgacacaacctaatgagccccatagcaacataccaccgagtacctgacgaatcgtccggccccgagaaatccgggcaatgaataagcccatgactggcataaaggataaccaccagccccagtagaagatcgtctgccgttgcatggccgttgcgtgaccatttggtgcagtattcgtgctcaacgtaataaacttattgacaaacaagccaatactattagtttctgagtttaaaatatacaaagttgggccaacaattaaaacaacgattaagaagccaatcgctaaccaaacatgggcagcacttagtcgaccgatccccttcttcaagccattgaaaacagccatggcgaagattacgaataataaggcaaataaccctaactttaaagtcatcgtatcggcaatcccggtaacggcactcaaaacttttgaaatgacagggatttccatcccgactgaagtaccaacaccacccataatcccaataataacgagaaaatcaatcgtgttccgggcaatttgcttacccttaccaggaccttgtagtactgaaattgcggcactgagccgctgaaccttgatgtgtttaacatacattgcataggcaattgcaatcgtggctggcgcaaacatcatccacgccattggtccccaattaaattgtcccagcatgtgcgcataattatatgcagaaattgaaaacggcttgacgccgaatgaagggctttggaggtaccgtaacgggtcaaccatgctcaacattaaaatgctggcatcgatcccggtcgcgtaaaccatactgccccagtgatacgttgaaaattctggtttgtcatcaggatcaccaagtttggttttccctaacttactaaaccctaagtaaatgaaaaagataaaagtgatcacatataccgacatataaagccagctcatgttatttgtgagccagttcaagatgccacttaaactcgtctccagcgaatggccccccattaataaaacaacggaagccgccgcaaagagcccaattgttggtaaatagacccaccaatcaatattcttactttttaaaataataaacctgctactgagcatatactctctatatttagatcaaattcgtggttcttcctaccagcaatggtagtccccacgcgtaaatttccgactagcaatcggtacacccctccgagttaatcctcggagcactcagcaccctgactgtatcaggtttgaccggcattgtcatccgcattctgtttgtgctaactcaaaatcagtagcagaatttccttctttccgttggttgaatccggacaacgccatactgacaaatgatttttaattgcttaatcgacgttggtgttcatcttgtttagctagtgtttctattaccatcgtgcctttagcacacgaccgtcgtcacaccacgtaacgattaatggttacactgctcttgctaatagataacccccttgaatcaccagataagcccaccgcacaactgttagattaattgcttggtgcaccaaaaaagcgcttagtaccgggtaacaagttaccacctgcacagcgcacgttggcttatacaaatgctgatttcagtattttctgatatctgatgttcgtttataagtatactagtattaaatcagaagtaaaatcaaccattttgagccgtcgaggcctaacccgtcaaggattagacgagttttacacccatattttttctgaaactttttaaaagttttcgtaataattagtttttagtttagaatcattcttatctgtttcaattaaaccgatttcatgttattcttgtaacaagttaaaaaacgttatcatctaaaaggaggggaactgcatgcggcactactataaattaattttaacggtcagcgtcggtatcattgcggttgttttacagtttggtttgcactaccaattggcagcacaaatcatcattacattaatggggtcacttatggccttatcaatgttagttgagatgatcaaaaccttacgttcaggtaagtacggggttgatttattagcaattacggcgattgtggcaacactagctgtcggcgaatattgggctagccttgtcgttctaattatgctcactgggggtgactcgttagaagattatgcggccaaacgagcgaataccgaattgaaagccttgctcgataattcaccacgtattgcccaccgctcagtcgccggccaattaacagatattgccgttgaagatgtccaaattggtgatcagctagtcgtcaaacctggtgagctagttccagtagacggtcaccttattcaaggaacggcactctttgatgaatcttcattgacgggtgaatctaaaccagtcgacaagcacgttggcgatgacattatgtctggtgcggtcaacggcgatagtgccgttacaatggttgttgataaattagccattgatagtcaataccaacagttagtcaaattggttaaagaatccgaatcacgaccagccaaattcgtacggctggccgatcgctatgcagtcccattcaccctggtagcatacgtcattgccggagtagcttgggcattcagcggggatccccaccgatttgcagaagtcctcgtagtggcttccccttgcccgctgattctcgccgcacccgttgcactcgtctcagggatgagccgaactagtcggaacggaatcgtggtcaagactgggaacatgttggagaagttatctacggctaagtccgccgcgtttgataagacggggaccattaccagtggtcaattaacagtcaaccaaattgttcctcagtctggttttactgccgaacaaatcttgcacctcgcagcgagcgctgaacaaaactcaagtcatatcctggcccgctcactcgtcaagtatgcgagtgccactagcctcagcccggcaacacaattagcagaagtaacgggtaatggggtcacggcaacgattgagcagcaacaggtcaaagtgggcaaacttaaattcgtcgcaccgactacaaccgccaagccacttgctaccactgctatctacgtcggcatcgatgaccagtacgcgggttacatcacgtttattgacaatgtccgccccgaagcagccgccacgcttaaagcactccacgctgagggcgttcaaaacgtcatgatgcttactggcgaccaacaggcaattgctgatcatattgccgccgatgtcggtatcgataccgttgctgccgacctcctacccgcagataagattgcccacttaaaggctgtaccagcggccgaacgccccgttatcatggttggtgatggtgttaatgacgcgccttccttggctgttgctgacgtcggcattgccatgggcgcccatggctcaactgctgctagtgaatcggccgacgtcgtcatcttaaaagacgatctcagtcgcgtggtcacggcggtgcgcattgctaaagataccatgcaagtggctaaacaagccgtttggattgggattgctatctgtacaatcttgatgttgattgccagcactggtatcattccggcactctttggcgctatgcttcaagaagttgttgatacggtctcaattctttgggcgctacgtgcattacgggatcggccacaatcatcagtctcatcaacaaccacaactcccataacaaaggatgtgagctaaccatgccagaatggctcttacgatgggcacaatcggcactgacttttgtcgttgttttaacgttcgtttcagtcgttttactcaacgtaccactaaaagaagcaattctcgttgattttgcttacatgctattaacgctcgccttcgattggtaccgcagtcggcaccatgcctcgcgctaattattcaatctaatagtcactaacgatggttttaccaatcattaatcaaaaaaatcgttcccagatgtcttcttgggaacgattttttagttaatgctcaatgcttcggtttagggtgagaccgaccactcgcattcaaagcctacttggccaacatataactaacttttacgtcgtccataatcgtggcaagtggtaccacatcatcaagcaaaattgaataccaatgtttcttattcatatgatagcccggtaaataatgttgtccatcaatcagcatagataagtcttctgggcgcgctcgcaaatctaataccgtcacaacatgtgttgcgcccggcaacgccagtttatcggaagttaccgtcaataatgcgccataccatttgtgcgtgtctgagcgtcgccaaaccgcgttttgtgggaatttaggccacaagaactcaagattgtcaccataaacagctttgacttgcgcaatcagcttacgctccggggtcgattggaagacgtcattatcgtaacaatgctgttcgatgttgtataaaacatcttgataggcctgcgctacttgacctacaaattgaccatggacttgggatgtcaggtgtaaaacatatacttcactagtcgtcgtatccgttaatatcgtgttcagactgccatcagtgttcaactcgattatcatttcaaattggccttgcataattaaagttcggaactgatactgaccattctgattgggttcaaatccaaactgactgagtttgctcatattgacccgtttattctcaaatctaactgttgccatctgctgcgcctccaacttcattcccacttatcctgaatgtgatgttcgactattgcaatccacaaacaagtcaacgcactcgttgtcgtttgatagccgctatatcattttataagtaatcacccgtaaagccaattcaattgaccattgctgtgttagtaagccgacctttcacaacaattaccattgttccaatcagccaatacttgcgctaaagctcagctaatcttgaaaaaacttcactaactcgtttttattgtttttttatacccgtccagccacaatctatggcacaatagttgataagtactggcaattgatgacctacttggttctttaaaccagcataacacaatcattttggctcgtggtattaacacatacatatcgttggttatgacctgaccctgtaccaaatatctttttggtcagcacagaaccatgtctgcgctgaccaatttactaaataataacggaggtcctaatttgaaaaaatatcgcgattatcgtaccgccattgcccgaacattgaccatgattcaacctaccgatgaaggcctcgcaaagggtgccaaagcgattcaggaaatcttaaacctggcgcttgatcctgataccatagtagattcggataatacacgcatagctagactagccactagtaacgcacacaatgagaccagcggccacgctacgcaagcaaacgcggaagattcatcatcatccgtcaaaacaacttctgcacaatccaatgggcaaacaatcatgcaagtaaagcgcgatttaaagggttttgatttagtcgaccccaatgatccgaccgtcacaccacgctaccactacgatgaaattttggcccgacaactggtgattcaccacgatgatcaggtcctgttagaacaaaatttacggcaacatcgacaaccttatattgataaaatcgttagtcacgctactacagcggatccgattactgtcgcaccatttttcgttgttcattatcaagacaccgatgatacttatcacatcgaacaagattataacggcacaaccttatcgtcgctcaatccggcaatgaacgatgttacgttcactagtcaagaagcgcaatatcagcgcatcagtaatggtcaattagtcgacctggcttggtataaggagcggcctgagaaggtggttattcgttacgttcatcatagctcgagtcaaccgacctcgaataaagcagccaaaccagctaaaaaggctactatccacacaaccaccgtgccagtgacgctgcgcaccttagactttgatctgcacgaaaaaacagttgccatcgtcatgggcgacgttggtacgcgccgaacacagatcacgcaactcattgatgagcacaacgggcacaccttattgattgatgcttttaaacacagtaatagcaccaacttctattaccggcaaatcggtcaagcagacctcgtggtcatgattcagaatcagaataaacacgccacttccaaaacactgaataaagctgtcaagcattacggtattaaaatgacgattgctgatggcggcgggctgcagcagattgaacgagccgtttaccgcggaatcgctgatcttcccgcttatgagagtggcaatcccattagctacccccgcattaatgacgcttcacagtagcagccatttagcccattaaaaccacagtaaaagccccgcagcagctaactaaaacgtttagctattgcggggctttaaacatatttcggcacaagccttaaactacatcgttgttcagtagcagacacatcatagcctaatttcagtcaccgaacgattgtacttaaactgtttggcgctggttatcctgaatcgcaactggaataaagtcaaaggtcgcgtaatcgaataacccccgtgccgttaacttcaacgttggaatcacgggtaatgtcaaaaacgatagcgtaatgaacggatcaaagctaagtggccgctcgctaatgacctcatacgctcgtttaagttcggccaactgttcagcaactttttgatagctcgctgcagacagcaagcccccaatggcaagcggcatggtcgctagcacttgttcatcgtcaacgaccgcaattcccccgttatcttgggtaatctgggctaccgcccgtaaaattgcagcatccgacgttccgaccgcaacaatattatgagcatcatgcgccaccgtaccagcgatagctccctgtttaagtgcgaagccatgaactaagccgacgcccaccttgcccgtgttatgatggcgctcgatgacaaccattttgagaatatcacgttggcaatccgcttcaaaattctgcgttgcatcaatcgggagtgttaagtgatccgtctcgatatggttcggctgcacaccaattacatttgccaacccggtcgctagtggtaattggaagtcggctagttgtgcatggtgctgaacacgcgttgcagtaaacggcaatggttttgtcgtgcttggtaatatccactgtccccgcttcatcgtccgcgcaatcctaacgtgttcgagatcatctaagaccactaaatctgccaactgcccggctgacagactgcctcgatcacttaaacgatgcgccatcgcgccgttgagactagccaatgtgtaggcaagttcaggacgcatcccgctctgcatcgctaggcgcacgttataatcaatcgacccttctgtgagcaagtcactaatcgtcttatcatccgtacaaaaagcaaaccggctagcattagcttcggtcactgcaccaatcgtcggcaaaacatcgcgttcaaccgtcccttcacgcaagaaaacagccataccagcccgcacacgatcctgtgcttccgccactgtcatacattcatgatcagtatccagtcccgcattgcgcatcacattgagctggtgcgcattcaaaccggcagcgtgaccatccgcatgatagccatacgcataggcatcactaattttagccagggtgtcagtatcaccacgcgcaacggccccatagtccattacttccgccagtccccgaacctccgactgttggtaaagtgggcgcaagtcagcagcatgtagcgttgccccgttatcatcaaagggaacacacggtaccgatgacggtagcataaaacagacatctagtggtgtttggcgcgcatcatcaattaggtactgaatgccagcaatacccgcaacattggcaagttcatgtggatcagtcgcaattgtcgtgacgccgtgctgtagtaagacttttcccaactcgctaggtgccaccatcgaactctccatatgcacatgtgcatcgatcatgccgggaacgatccactgaccggtcgcatcgacatgctgggccgctatgtacggctcgtcacgcaagttactaataatccggccgtgatcgatccacaaactggtggcttcaaattcacgggtataaacgtttaacacttgtgcaccagtaatcaccatttcaactgtcttcgtcatcgttattttctcctcactagtcagtctgcctacggagaaagcaaacgggtccacacggcaaattaagcagtgtagacccgtcgactcaattcgcttatagtccagtgtttacggcactgggtagaaactcgccatccatatcatggcattatataggcaattagttgtattgataaattgttccttactttaccagccttttcagttacatgcaagccctaattatcataaatgattggtacaatgaacttagaactagacatgaatattcacctaaatcaatgtcgggtctgccacaaacagcgctggcattttaaatgaacggcatacgatttgcgacaaggtcccttactggtgacgccatctaaccagaatgctgattaggatgttgttctgcgtacattgaaacgcaacatgttccgataatggcaagcccgtgaataaaactgttggccgttaagtcgtcttttatgatgatttgcgagcagtcgcctttgatttaaagcggacccgctacgattaatcaacagtcatatttttaaacattcttttgctgactataagttcatttacgtttacaataaagctaaattaatatacataactatttttttaggagctgatgattttgatgatgatgaataatccgaccatgctctcatacattcgtcgggaacagccagtactagagcggttgttaaccaattatcccaaacagattacggcggccttgactgccacccctgatcatccacaacactggttgatcctcgcaactggttcaagactcaacgccgccaacaccgcccgcttatacatgcaaaagacggccgccctccaagtgaccattgctgcggccgacctctacgtcacttatgaggaagctgatcccagtgtcgatgttgttatcgggatttctctaaaagatgatgatccaaccatgcaagcggcaatcgaaaaagcccacacggccagtcaagctcatgtcattatcgtgactaatcaaaaatcgactgctctgaccgcaatggccgatgcaacttgtgacttactaactggcaaagaatcagtgccctatattacactaagctttcaagccatcgtgctcactttaatgttgcttgccgtccgcagtgctgcccttcaagcacggttaaccgaattagcaatcaatcaagaattagacgagttcagttttctgattgaaagcatgaatccaactgttcaacgggcgaacgacttctaccgtaagttcactattgatttcactaacgcccctcaatttacagctatcggtgctaacgtcctagctggaacactaactgaaatgcaagccaaattcaccgaaatcctccgggtaccaacgcatggttactcattagcctcatttacccacggtggctttatggggacgcatgaagatcactgtcagttctatcttgaaatcaatacagatccagctgtcatgacccaattacaggccgtcaagacgtacgaatcgcgattaacgccccacatttataccatcagtctcactggtgaccagccgaccatcaatgatgatcaaaccctccagctcgaagccgttgctgatccgtataaagccccactacttgcgattatcccgttccaagtcttagcttggttcattgccaaatcacgcgggatcaatttgaaccatcccatgtacgcagattttcaagcggctactaaactcaagtaaagattactaaatcaacgcaaaatgaggctgtgacataagtctctagaaacaaagcaggtctggaaaaatcttcggatttttccagacctgcttttgatataatagaaaataaaaaaagagcatcggtcgcacccgatactctacgaaattatcctcgaaaggacattcctaatatgcaagattattataacatgaatcaaaccactttgagtattgccttggattaccaaccagaagatcatcattctgctcgttacatcaaccagcttgttgagagtttaaaactaaaatatgattaccagtttggccgtccgcgggaatataacctcggtgccatgttaaaactggtccttttagcgtacagctatggcattttcagcagtcgtaaaattgaacggtttgcccgtgaaaacaagccagctgggtggttaattgccgaccaaattccgtcctaccggacgatttgtcgctttagaatttctgatgaactggccactttgacaaccgatagcttatcacagctaacccaatatcttcgtcaaaatggcatgattgatgatgtttcatttattgatggaactaagatcctagccgacgccaacaagtatagctttgtttggaagaagaatacgatacgatttgacaagatgaatcgcgaaaaactcgttgacctgttaggcgagcttcatgaagctaaaattgtcggtgaaattccggcaggatcagagctgactcccgaactattggatatcatgattagcaaggttgaggatcacttagtggtccttaatgaaaccgtggaagcaactaagcaggtttccccgaacccagccaaacagcaacgccggactgttaaatcacaaaaacgtaagttggataaacgacgtgataaaatgcgtgaacaccaagcacagcaagcaatctatggtcagcgtaacagctactctaagacggatcacgatgccacctttatgcgggtcaaggaagatccgatgcaaaacggtcaattaaaacctgcctacaacgttcaaatcgccacgagtaatcagttcattacgggatatcggcttttccaaaatccaaccgacacacgaaccttacaaccgtttattgaacatttaaaggccaacaatgtgttaggtcacaccatcgttaccgatgccggatacggttccgaaagtaattatcggtacttggaagatgaattcggtcagcataccgttttgattccctacggcacaatgcttaaagagaatagtcgaaaatggcaaagtgatgaccgtaaggttatgaactgggactatcatgaaaaagatgattattttatcaatccgcaaaacgtccggtttaattttaatgcttatcgtcgacggactgataagtatggttttacccgtgactttaaagaatacattgccgaaaagtatgatgaaaatcatcaactaattgccgcggcactaacaccaaaaggatatcttaaaaggatttccgtgaacgaaaattgggaatatttcaaatcgaaacaacgagaattactttcagctccagaaactggtcagatttacgctcaacgtaagatcgatgttgagccagtttttggcaagatgaaggcttctttacatttcaatcgattctcggtgcgaggtttcgacaaggtcaccaaggaagccggaatcgtaatactggcgttaaacattatgaaactggtcacggtagggaccaactttaaaaatcaaaggcgtaagcaaatgggacgagaaaccaaaattcggtttctcgtcccatttgcttatacagaggctagttatgtcacagcctcattttaattaatgctcgttttccgtaactgcgtaataccgaattctcttatgttgacgctgtgcatagccaatttcttgcctagtccgctcaccaatgtagccagcaacattaatgaccactacttcatctgccaagtcgatttttttcaaatgtgtctggcgtaaattctgaagttcaattggtgttaatacttcatcactgaaagctggctttaaaacaataacaccttgtttactcagagccagctcaaccgtttcaaatactgccgcatattttctagacccacataaagtaactattttaacagccattcgtcaaccttccctaaagtgaactgatcgaccaacgattaaacttccgtcgcagtcacatgcttagttttcactgcagttcgctgattcaagtgcgccataccaacaccagtgaaaccgctgattaccgagataactggacaaagtaaactgaagaaaacaaacggtaagtattggacggttggtactcccagcgtcgtcgtcaggaagacgccgccaacgccccacgggactaggtaattgatcaccgtaccgccatcttcaaggacccgccccagtgcatttccggataagccaccatcattgaatgcctggcgaaaagcgcgccctggtaagataatcgaaagaaattgttcaccaacaaacacgttgacaccaatacaagttaatacacccgccaatactaacttgccatcgctattcaagtgcttagcaaccggggtcataatttgattgatcagtccaaacttgaccaacaatcctcctaaggatagcgtaaccacaattaacgcgaccatactcatcatgctgacgattccgccccgtgaaagcaacgtatcaacactcgtattccccgtcttcgaaacaaatcccgtgttaataatggcggttaacttcgccagtgataactcaggctgttcaaatagaatcaagcccgccgaaataaaaatatttaaaagcatcgttggaatggctggcattttaaacccggcacaaatgaagactaagacgattggtaacaatgccaaggctgagatactgaaatgaccatttaaaaccgcaactgtttgattgatcttggctaagcttgtctccgtattactgtgccccagcatagcaaacaagcctaatgaaatgagcccggccggtagcgtgctccataagatatgcttaatgtgcgtaaaaagatcagtatccactacggctgaagctaaattattggtttctgataatggtgataatttatcgccgaagattccaccactgataattgcaccggcaactaaggctggattcagattcatggtcacgcccatgccgaaaaaggcaattccgaccgtcgatgttaccgtaaaggcactgccgaccgccgcaccgactagggtacaaacaataaagactgatggcaaaaaccactgaatattaataattttgaatccaatcaccatgagcgtaggaatcgttcccgccgcaatccaagttgaaatcatcgcaccaatgagaataaagatgaagattggcacgatccctttatcaatgccctctttaatcccagcattaactgctgaccatggaaaaccgcgcaacatcgcccaaacagtgacaacgcccattgcgagtaatacgggaacttggggcgataatccccaaccaatcacacccgcactcataattccgaggacgaccagtaagacaatgactgcttctaaggtactaatttgtggtgcttttgttttgttcataatttattaccccttcgattgataaaattccagtgacgcatattcatcatcaaaattttaatatcgtgcaatcccaccacagcgttgatttgtcattattctcatcctcttcatcaaaaaaatcgtccccattgttcatatgaacaacagggacgattagactagtcgcggtaccacccaggttgcggattattgacacttaatccaccactcactagaagataacggttctagttattatccgttcagtcgaaactcggttaccgtatttcaatcatagtagctgaccggttcgcagcaaccaccggcttcctgacacctaccactatgtctacttgatgtaacgttatcgtacagttattaacttgtgattaacaataccaccatcttttatcatcgtcaagccattttataatataattctcattttaagattacgaccgtgttacagctcgcaagcgcgcttggtgggcaaaagtgatgccaccaaatagtaacgtccaaataatcgcaccgattgcaccgacaatatcagcttgaatgaagaatagactggcaaaaatgagaacaaaaaaggcaatcgtcagtgggctcgtgattcggtacgccggcatcttaaacccatccgccagatagtcattagatagccggtacttccggtgggccagcatcgccagcgtgtaaacaatcaggtacatatcactagagatcccggtcacgacggtaaaaactgccgtcgttgcagcacttaaactcatgatgggggtcactagcactagtaccgcggacaacacgattgctgctgccggcacaccacttttcgaaatctgaccaaagatttggtgcatgcgactcgtaactggcatttcagtggctagctgatagaagtgacgtccagctgagaacaaacaactatttagcgatgaggctgccgacgttaagacgacaaagttaatgatggcggccgctgctgggtatcctgccaacttgaagacttgcacaaacggactgctatcgggtgacagtgatgtccacggaataatgcccataatgacaattaacgcaccaatataaaacaacaagatccgcaacaaagtttcattgaccgcctttttgataacgcggtgagggttcttggcctcaccaatcgttatactgacaaattcaatgccctgaaaagcaaagaagaccattggaaatgccgagataaagttagctatcccattgggaaagacctgataattatggaacaaattgccgattgaagcctggcctaatggggttgggtgatgtcccaccatcatgaaaataccagtgacaatcagtgcaatgattgcgacgatcttaatcatcgcaaaccagaactctgcttcgccaaataaccgtgcagccgttaaattaacgcccgccaaaattaacaggaagctaatctcaattagccaggcggggacatttggtaaccaaaatttgacatacgttgccgtagccgtcagctcagccatacagacaaaaatcaaaccgatccaataggtccaccctgtaaaatgaccaacactcggtcccaaatagcgggaaataaacgccacgaatgtgtgttggataggatcagaatagaacatctcaccaattgcccgcatcattaaaaagaagaagaagcccaacaccaagtacacccacatgactgacggtcccgtctttgaaatcgtactccctgaaccaagaaataatcctgtcccaatcgtgccaccaattgcaatcatttggacatgccggttactaagcgcccggattgtgccatcagcattagttattttcataaagcccctccacaaattttaatgattttgttgctaaaatttaatgttgtgccattatagcacgctctagctttcacttaattgcgatttttaactgttaacccctgtttttaacgacgaataggtcgcaatactttgttttctaaagctgtcttccttattgaaaacgtcaccaaaactgtagttgctgcgtttgaccgcctaatttggcgctacgaaaaaagccgcccgagtatttacccgaacgacctcatttatttaatacacccatcctgacacaataacacttaccacaaaaaggcaatcatcttgtgagcgacacttggattctgattcaacgcgcaatgcgccgcctgttccccactatagaaagcttcttgatactgtgctaattttccgcgcaacaagtaccgaattgagcgcgctgaagcgacacccacaaaaccatcattgttataccccgtgtttgtatctccatagacattgagtagtttcacgttgtctggaaaattgtggcgatacttgagcatttctgaaaaatgcttcgtgaaacgacttggtttaacatccaagcgccggaccgttgcttccgtctgcgtgctcagaaacccggtcaggccatcgaacggtccgccaatcgtcacgattttattcaacgttggtaagcgtttgtcatgcccatacttcaatgcctgattgacaatatcattggccccgagggaatgaccaaccgcattataagctttgacgccatacttcgcttttagttggactaagacttggtgtaaccaataaatctgggctttttgtgaggcgtgattatcttgaaaaacaacttgaaccatcggattcttgattgacttttgccaataacccttaaaggccatcacaccattcttgtacacgtgcaccactaacgctttttgggcagcccccgctttttcggctttacgaatcagatagttcgtcgaatacgccccaccattgtagccatgtaaaaagaccgtcgctgtctttgactggtcatattgattctttaatattcgtgcagaacgcggtgtcaattgactcgttactttcgtaatcttggtatcatgattccgggccccaactaaaatcacagccgcaccgataacaaaaacaatcaataacaattgaatcaccgttcgccaacgtttcatcaaaattatcttacccttcattatgtttaacagtcttattttacgcgtttcaattaaaataaccagtcatcgttttcaacaatcgcctttttaacccgcaccaacgaatattgaacccaaatcatattctttagccgctcatctcgttataatggacttactaggttaaataactaacctactcaaattgtttatttctggagggtaactatggaaaaaccaacgtttaaatatcctgataaggctgcgtatgagttcgtcattcaagccttagccgcaaaagggattacttatcatgaaattgcgcatatcacttataacttacaaacaaaatacgtccctaacttaacgatcgaagagtgcgaaatggagacgcaagaagtactgcacaagcgcgaactattgaacaatgcgatggttgcgttagaactcgaccgccttgccacagaaggccagctaaacgagccgctccaatctatcattgccagtgacgccggcgtcttcggtgttgatgaaggcttagcacttaatatggcgaatatttacggcaccatcggcgtcactaattatggttacgtggataaagttaaagaaggcgtcattaagaagttagatactgataagtcaggcgttgttaacacgtttattgatgacctagttggtgcgatcgcggcggccgttgcggctaaaattgcacataagtatgcctaagcattgtatttgctagtcgttatcgcttataaaaatcagcaggcatcctacttcaatgcctgtttgcttgaattagctagtctgtactggatatgtccgctaaaaaacagttacctcaaaatgaggtaactgtttttttgttgaccatgctcaccactgaattaacccacaactgccaaatgacatgtctactcctcgacctaactactgtaactgatccgcataatctcgtaagtaagttgtcatcgtatgcggagcgtgacccagcactttttcagccgtatcggtcacgcgtttagcgttgcccaactgggtaatcaaatacagcattaccataacattaacatagtccttcttgattccccgcttcaacatcacgcggcgaaaccgccataagctcggtcgatgatacgttaccgggtgaccaaaggattcagtcattagcaccgcaatttgctgataagtcaacgcttctggaccagtcacagtcaatttctgttgtaaatattgtgtatctagtaacgccacgcccgcaatctcaccaatatcacgtgtatcaataaaactcgtcttcgaccgcccggctgggataaacaaatcgtgattttgctgaatgtcgacgcgatgcgtggtattcaaattttgcataaagaagctcggtcgaatgaatgtgtacggtaactgtaactgttcgatcatctgctcgatttgatgatgtggcgtcattggattatgctcaacacccatcagcgaaacaaatacgacctgctcaatgtggtgtgcttgtaagcatttgaggaagggccacatatcttgcttgggtttagcaagttgtggtggccgcacgaaaaaaaccttttggattccccgtaacgccgcatcaaaggtcgtctcgtccaaaaaatcaaagcgtcgaatttcaacatccgaatacgcagccaatagttgctcgtctttatgcaaattgtgggcaccagcaacaacttgcacccctacctgttgatctagatattgaattaacggtaagccaatatttcccgtcccacctatcaccagtattttcattttattaattgctccctagtttttttaacagttgtcttaaagactgtttttcagcagccgtcaatttctgaagccccgtcgcaacgacctgatcgctaatacgctgaccggcctgcaattcttgtatgccaacttgggtcaagcgtagtagctttgctcgctgatccgctggattaacgtcctgttcaaccaattgcttggcagctaagcgtcgaagaattcctgacatcgtcggccggtccatatcgagaacgtggcacagctggttggcagtcggctgttgcgccgttctttcgacccaaagactgatttgttgcatcacagcccattgttgaatcgtcaatccgttagcaattagccgttgatttagctgataacgtaactgtttggaaaactgcattagtaaataaccaatattatccatttcatcctccgctatttagttagtatactaactaaatagctataatttgtcaatttacacacaaagcagtaccgcttaactgtgccaatcagtttatgttggcaagtaagtagtactgttttataatgtttcgccccaaaaacacggcatcaactcataagccgatcattttaagccatctgatgttctgacattgcttgcatcttgagtacgcgctgttcacgtggaataaacatccgaatctcatcttggttaaagccgcacagaagtcggtgatcgtcaaaaataattggccgccgcaataattgcggtgtttggcttaatacccgaacagcttcgcttaatggcatatcttcaatcggtgtcgtcttactcagttggtgataagcattggacttagtactgatcaaatcatcaatgccattgtacgtgtactgtagcaggtgcttgatttcagtctccgttaacggctgtgcattcatattacgttcatgaaacgggatccggtgttcgagtaaccaccggtgggccttgcgacaacttgcggtacttggtaacacacataagtttatcataaaattatccccaatcttgcttgcctaacaatgcagcccccattattgcgcactgtaatagttgacgtcattaattaacaacataatcatagcaaaattcgcagctaattgctagcgttttcaaaaaataattaaaataatttgatgggtgcagtttattgcaggcctaatcccaatttcatctataccaatattacgcaatttatattaagcggttggtaattgcccactatccttcaggtaatcacgcagtaccactgcctgattatgttgttcgtccttggcaccgaacaataagatcacattcgtcttcgtcagttgttcagcaacttgactaataaagctggccgtcaggggattctcatccaattcagcccggtaacgctcgacaaattcgggatatttcgccggttcatgattgaaccacttacgtaacgtggtcgacgggccaatttcctttacccaattgtccaactgagcgttaaccttcgaaataccccggggccacaagcgatctaccaacacccgataaccatccgtatcaactggtttcgtgtaaatccgttctaattttaattgcataatgaacactcctcctatcgtacgctgcggtaaacaatctatgaccatttacaataacctatcacatttcatgaccataagttgactccattataacgcaggtgccggtatcgttaaatcgaaccaacactttcccgcaaccacatattgatcagtcctcatgacagccactatcatcaattcagtacaaaaaaaatcaggtcccacgaatggccctgattttcatcacaatgagttgactaacatcttatcatgattatgacaatcacgttagccttcaccgatcacaacttcaacttggccccttttcggcacaaaattaatgttataaatcggttcccgcaataccttttcatattcttctaagacatcttgtggcaatggcgtatgggcggccaatgcgcgcattaagtcatcgaccgaataaacatcttccatgttaataaagatccgcatatttcccacaacatcattcaataattctgtcaaaatcgcattgggcttaccgttaccatctgtaacaaccacttgattactgtcgacttctttatggtctatctttgttaacttaacgatatcaaatacatttaacatgcgcgaccctccgtcacaatattgatttgctatattctaccacaaccatagcacatctgaagggtgaaaagtatttaatgttgactgaattaatcaattgaatagcgtgcaaaaattttttcttgaaccttaggcattggaagtttctgccgctcaatcaacgtaaaggtctgaccagcaaagtaggctaagtcacttaacccaacttgaccactcaaaccttgaatggtccacttctgatgcgtaaacgtatgggtcacaggccgcccggtcagataatgggccgttagctggagctgatattcacgtttaaaataattttctaccgccgtaactagttcttcaggttggtaatcatcatctaagtctaaatctgcaatcggaatcaggggaaccgtccataaattagccaacatcccgttactcggtcgcttcgtcatcaaccactgatcctgcatcttagctaataccgccacgtaagcaaccggcttgggccgcggtttcttcgtcttgaccggataggctaactcatccccatccaaataagcttgattaaagcgtttgaccggcgaatgagccgtatctggttgccgcgctgtcatgtagcttgaaccgaggtccataatcgcctggttaaaatctccaggtcgctcttgtgaaacaatctgactgattacccgttcaaaaacagcgcgggtctggggcttcgcaatatccgcatcaatcttgagcaaccggctaaagacgcgataggcattaccatccacagctggaactggttcattgaacgcaatgctggcaatcgctcctgcagtgtacgggccaatcccaatcaactccgtcagctcagcggcagtttgaggccactgtccatcgtaatcggttaacaattgtttggcacaccgttgcatattgcggacacgtgaataataacccaggccctcccacgcctttaacaactgtgactcaggtgcggcagctaggtccgctaccgttggaaaaagtgccataaagcgctgataataaggaatcacagtttgaacctgcgtctgctgtaacataatttcagagacccagacgtggtaaggctcatggtcatgtcgccatggtaaatcgcggccttcgtgatcaaaccaatctaatagcgtcgtctgaaaatctttaattgttgccgcatcccattcaatcattactaaccctccaaaaaaggccacgaggcttcgtctatccgaagttcgtgaccaccttatttacaaattaatccaaagtgttagccaaatctacgagtgttttttcgtagtgatccgtcacactttcatcctggaaatcggcattgaaaacggccaatgtcaaatactcggggtattttaagatgaccgctgccagccgcttattaatatctggatatttttgatcttcattattcaaaatatccagactcgcttggtaacaaacattggctaaaaacaaataatccacaaaataattaaatcctggttcgttttttaattcaaaatgcgccttcacgtccactgtttccgaaatattcgttaaatacttcgttacaatttcttgatactgacgtaacaactccgcctttgcttctgcatgtaccgttgccataaaatatccccacctaatttaatctctgtgaagattatagcatacggcgtaacccctgctgaatgttagctgctaatccagctaactgatcgtactgccactgacgctcggcagtgaccgcaaccatgtcatttggttgcgttaaattaaccaatttaattgcttggtccgaggcccgcagcgcattttcatccgcatctgcggaagctacggcccagcgaacgcagtccagtgccgccgcaccaatggaactcgtcgtcgttgcacttaacttagtcaatcttgtcagtgcctgccgtacctggtagccactaacaagattaacttgccacaattcattagcatcaattgcgagtcgcaattgtcgatcatatttctgttggttatcaacatactgcaaggctttcttggcgataattaacgcccatttagccaattgttgttgtgagagttcaccagtcaaagcttcgatttgagcccgtattccagggtcatcgtcaatctcaatcttagggtgactcggtctaaaaccttccgtcatcacgcattcctactttcttacaaatccgacaacaaacatatcctatcattatcaatattcagttcaattgatatatcgataggattaaattgtaccagaaatccagcaaagatgtgagtatctgactccagatttcatcaaaaatttacaaattcttgtaaccgtttcatccactataaatacaataaaaagacgccctgccaccaatcgcggcaagtcgtcatataaaccattactgaatttcaatatgatgggtatccgcagctgccttctttggcaaagttaactgcaacaccccattttcatatcgtgcttcgatcttgtcaacatcaacgtcgggtaaagaatattgccggccaaagcgaccagtttgacgttcgctcgcgataatattaccatctttatcgctttcatcactaatactatcgcgttttacagcaatcgataatgtgccatcccgatacttcaaggcaatattctgtttatcgattccaggaacatcgactttcatcgtgtactgatcgtcattttctttaatatcagtctttaggaccgacccatgactaccagcatttaagaatgtccgaccgaatccattaaccaaatcgtccatcttagtccagtcattcaaccgatcaaataaatcattgtgccaattcatcatatcgttagccattatgaaatcaccctttcaatttgtttacatcattaataataagcactttcatcaagattgcaacaatttagcactctccgtatcagagtgctaaatcacttcacttgatatgcccgcatatcaactgggatcaccctgaccattttatgtggcgtgattgttagttgctgggtcgtcatcttcgtaggccagcgagactgcgggcgatcagctaattccaaaccgaccaacattctgattcgatccagaatatcaggcaccccaaatacattattaccctgattaaatgaagtttggagcatattaatggcaacctgtaagcgctgattatggaagctaaaggttactggcacgtacaccagatcagtagacgataattgctcttgtgccaacgtcttatcaagctgcgccataaacgctgtaaattgatccatttgcgtcacccccatcattaattaccgctattatactgcaagactgatgtgacagctattcaaatggatggctgtcatagcattgctaacaaccgaccatcagtctccgtgccaactgcaattttgctcgaaccagtcaatcatcaccaggcgatcccgtgcactcattttggacaaaataaaagggcgcgaccaatgtctcgccctaactgaagaatcacgctaattattagttattagataactttttagcatcttcatcgatcgtttcgaaaccggaaacgccactcttcttctttggatgctttgcacgttcttcttcggctttttgaatcatagcctttttttgttccttgctaagcttttgtgccatgattatcgcctcttttatcttggacagcgaagtacaacttcgctacatgttcattataagtctaaattcaaaaagtggcacaaatttgcttaacttttttgaaactgcttacttgaattctgtaataattaagtttacagttaagatgttcaggaggggattatatgacaaatgtattgatcttaggggctgcgggccaaattgctcgtttagccgaacagcaatttttagccaacacaactgataatttgacactttacttacgtaatagtagccgggtcgcagaccaacaatctgaccgggtgacgattatcgatggtgacacgactgatgaagccaaattaacccaggcgatgacgggacaagatgtcgtttatgctaatttggctggtcaaaacatcaaacagcaggctgaaacagtgttaaaagccatgcataccagcggcctcaaacggctcatttggatctcaactttagggatctatgacgaagttcccggcaagttcggtcaatggaacaacgcaacgttgggtagctacctgacgcgctactacgccgcggctgaagtcctagaaaattccgatctcgactacacaatcattcgccctgcgtggttgactaataaggacgaaatcgactacgaaataacccagcgacacgatccgtttaagggaactgaagtttctcgtaagagcattgcggcactcgtcgttaaattaacccaagatcccacaagtaacattcgcacgtctttaggtgttaacaaacctaataccgatggtgacaaacctgcttggtattaattaattaccaggccgtcaaaaaaacaatttaaagatcaaccagaatcaccacaataggcaatgcgtggtggttcttttattatccatcaaattatgagaaaaatgataatatctagacagttaactaacgatgactgataatcaagctatcaattcactggtacaaccagcaatccgttctcatgtttttttcatcaaaagcaatacctgtaaccattgataaatcgcgggtctttgcaattgacggtcaaaaatacaagtgttaaattatagactcaatttgaaaataactggcgatattcttcagttttcaaggaggctttcacttgaatttgaaatggtacgttaagcaatttaatggtctaaccaccacccaactgcacgatatttatcaacttcgtgccaagacctttattaaagaacaagatcggtcttaccaagaccctgatgatactgacttggacgcgcgtcacgtcttcgcctacgatcaggggcaactcgtcgcttatgcacgaatttacgaacatgctggggtcgtttcgttcggccggataacgactgacagttgctatcgtgggacgggccttggcaagcaactcatgaatcacgtcatggcaattcttaaagtgcattacagcgccgccaccattgaaatcgatgcccaaacgcacgcccagaagttttacgagaagttcggattgattgcggaaggtcagccttatattgacctgggtgccgaagttattaaaatgcacgcccccgcccggaaactggtgttggcgtagcacaacttaccaaccatcgtcccccaagataactttaatctactcaaattatgattaaagctgcgcatcagaatgttaaaattctgacacgcagcttttatttttggtcatttcacaaatggtcaagtcctgctgagcccttattcaagggccctaactaaacaaaaatgataactatcattacaactaatcactagccggatcactccgatactgctgcaagatataaatcgcgacaatcaccaataacgagccgaggatttcgacccatgtcacttgtaagcctaagaaaataatacttagtacaaaagtcactactggttggacggcatcaacaatactgaccaccgcagacggcgcgtactgtagactatgtagcaacgataagaaagcaaaaatcgtcccgattaaaacgatggcgccaattgaagtcactagcgttggtgtaatttttggtgcaccgatccaaattgggtgatataaattaaataggattcccgcaatcaatgtcccccaaccaagaatcacgaccggtgaattttcggctacaatctttcgcggcaagactacgtacaaggccgctgttacccccgaaaggattccccagacgagtgcatccatcggaatcgccaactcatgaatgttacccttagtgattgctaaaaacacccccaacaaggagaccgcaaacgcaattaaatcagttcgtaaaggcagttcccgtttaaacagcaacgttcctagtacaataaacaaaggacttaagtattgtaaaatagtggcggcagcggctgttccgcgctcaatactgatgtaaaaagtatacatattcgccatcaatcccactgtcgcgtatgccactaattgtccaaccgacgcccaagatctaaagactttgaagattttggtaccctgttgcacaaatccaatcgctaacagaatgattccagcagataacgtccttacagataagaaccaatcagccgggatggcttggttttgtgatacgaactgcatcactgtacctgagactccccacagggtcgaggccaacatcgcccacatgatgcccttcatataacggttagttgtcatatttttcaatttcgctctacctcaatttaattaatggcaatattataccgagacttaattaaaactcactgaaaatcgagcgttgttttttaggaagattcagtaatctttatcataatcaagttctatcatctataagcaacgataaatccgaacttttattactcattgtgcgcaattacacggaaaccgccctcaactaaatagcactggggcaggtaactacagtaattgcccgccccagtgctatttaagttcgtaccgatcctaacaatttgcgcccatactgatgccgtttccagcacaccgtacttcaagtgccgtttggttagctattgtttcactgttgacaatccctagtccgaactgaccaggacagaagtacttaaaagagcgtcccaacgtagtagtgaatgaacatcgtcacgatcccaacgagcacgttgcgaatcaccgccgtcttcacattgcccttacctaatacggccgataaatatcctgttaaggccacggcaacggacaccgcgataattgttgccggccactgccaatgagccggtgcaaacgtcatcgcgagcaacgggaagacgcctcctgctgacgctgagaatagcgatgcaaacgctgcatcccaaggattcatatagtgtcctagttgcatatcatatttgatgctgacaacggttgccaatggttttttagttaataaatcgcgtgcaatcgccatcgccgtctcttccgttacgccaagagtcatatagtggcgttgaacagcatgcaattcaccctcaaaatccgtcttcagcaattgccgctccttttcaaccacggctttttcagtatccttctgcgtgctgaccgaagcatattctcctgacgccatcgaaaaagcacaggctaataaatcagataatccagcaataaaaatcgtgaactgattagtcgtggcggccgccacactaaacagcacccccacaacggttaaaataccatcattagaacctaagacacctgctcgtaatgagtttaacttctcatccatcgtttgtttggtcttctcagactttgtccttgtcagttgcataagctcgctccccttgaccctttaattaagcaaataagtgaccaataaagtacgttacgatcatcgtcaataacccggcaacgacgttacgaaccattccacgccgacgattagcattacccagcatcgccgctacgtatcccgtaatcattaatgcaattccgacagccaacaccgttgctaacaccttcacccgtggtgggaaaaaggtgatcgaaactaatggcaaaattgagccagtgggaaaagcaatcatcgacgcaataccagccgcatacggactgatgaactggttcggattgaaaccatagcgctcacgcaccgtcgtagtcagcgcatcttccgccatcatttcccgggttgcttgttgcgccaacggtttactgattccttgattgacatatttttgtacgactagcgacgcttctgcttcataatcatcggcaagtgctgccttctgcttagtaatcgccattttttgtgaatctttttgcgtattcacggagacgtattcacccatggccattgaaatcgtcccagccaacatcccggctagtccagatattaaaatcgaaaaactattggtggttgcccccgcaacgccaacaacaatgccggcaactgatagaattccatcattcgctcccatgacacttgctcgcaaaatattaacccgctgtgccaaagacatcctttttttcatgtttgccgcctccgtaaatactttataatcattattacctagtaaatattatatctttcagaaagaaaatgcaaggcttatttgtaatcattatcgagtataagttatgtatccctaaactataatatagtgtaccaccatttaattattaaagttaatttgaataattattataggtcattgaaagtgctattctgcctagaatcaaaaaaagcagcaccgttagcattttatgctaacggtgctgctttcatattttgaccctaatatattccaacttagtttgctaaccggaactgttgggttgtctttaattcaaattcagtcggttgcgcggccgtcattaaagctggtgtcaattcgacccgcgtaatcgtctgatccgcgtatggttgcatgtaaaatgctggttcattcatgctcatataggcgcggtactgggtataatctggcgtcccgttatcttgcatcttaacgcccttaggaatctccactgagttcagcatgtgtgataatgcgttgacagcttctgcatcagtcgttactgcatccgtatgttcacgcatgaagaccgtccgaacgaagcgtgcaactgacgtatagtcaccaggcattcccaacgccccagttccaggaccgaaaggattcaccgtcatgtcaccgtattgacgactaggatgagggccgggttgtaagttgacgtaattactcaaattcttgagatgccattcaaaatctggtgtgttcgtcatgacgcccaccggattcttcatgtagtgaacaccgtcattttccaattctaagacgtaagtagaaccactcttgtcactaatgatccagtgtagtggtaccacaatattcaatagtggcgcggcggcttccatcacgttcaagtcagcaatccgttcgcctaattcagcggtgctcttcacgtttcctaaaatccacattaaaacttcgtggggtgccaagttaaccttgccagccttagtctgctgagtaaagtgagcttgtcccgagaaatagagtgcagcagcactgaccccgtgctcattgacaccatcgacaaagatatagccatttaagtcacggcccgttccaacaaagctatacgggctatcaaaaccgtccgcattggtaacactgtcaaaatggtgattccgtgggattgccactggtcgaccaccaagttcaaaagcaaagtccatggtgcgtgctaaaaactgatcacccgccgtggtttgaatcgttaaactagtacacatgggtttcacatccttgatttaaatactattattctagcatctaaacccattataaacacacatttgcacaaattaatttacgccaatcagtttatcttagtcttttaatcgtaacgtcatcgcattaattgccacgattaccgtgcttaatgacatcactaccgcaccaaacatcgggttcaaaataaagccgagtggtgcgagaataccagcagccaaggggattgtgatgacattgtatccagcaccccaccataaattttgcgccatcttccgggtcgttcgccgggccagagccaagaaatcgaccacatcatttggattactcttaacgagaacgatatcagcagaatcaatagcaacgtcagtcccagacccaatggcaacgccaatatctgcccgggccagactaggggcatcgttaacaccatcgccaatcatcataacgtggctaccatcagcctgatactgttgaacgagcttagccttatcttcaggcaataaacccgcatgcacttctgtaattccgagctgcttagcaacgacttgggcgctctgcggattatcaccggttagcattactggggtaatgttttgggccttcaaactatcgatcaagttcttggcttccggcttgatctggtcaccctgagcgacaaaacctaagactgtctgctcctgaatcaaaaaactgactgagttaccggcacttgccagtcgattgaacgtttgctggtcataggctaaattttgtttatccaagtaagctgccgaaacgatctgatacgtctgcccatcaatcgtgccgcttaacccgacaccagtaatctgatgaacatcctgactaaccttaggggttaactgatgttccttagcggcagcaagaattccgacagctaagggatgactagagccattttccaaaccggccatcatcgccaagactgcgtccgcagttagccggtcggcgctactttgataatcagcgaccttaaagttaccagctgtcaatgtcccggtcttatccatcaacgcgtagttcaactttttgacttgttccatcgcatcccgattacgaatcagtaacccgtggctggccgcaatcgccgtactccgtgccactaccaatggaattgccaatcctaaagcgtgaggacaagcaatcacgagcactgtcaccgcaattgatagtgctaacgccagattgcccacgagtaaccagacgataaaggcaacgattgcaacggtcaaggcagcgtagaacaagagtccggccactttatccgccatattttcttgcgacgatttggccgcctgtgcgtcactgactaacttcatgacttgggctaagtatccggattcaccagtcccggtgactttcatctcaaacgtcccatcaccattgactgaaccacccacaacttgatccttagcgcgtttttcaactaacttagcttcaccagtaaccatcgcttcattcacactagtcgcaccatttaacactgtgccgtcagctggaatttgttcaccagcccggacctgaacttgatcaccattagctagatcagcaattgccacgtcatggacctgcccatcaactaacttatgtgccgtacttggtaacagttttgctagtttatctaccgccgatcccgcattcatgaccgtattcatctcgatccagtggcctaacaacatgatgacgatcaaagtcgctagttcccagaagaaatcggtcaccattggttttgcatttaacaagtcattggcaaccacagcatagatactgtaaacgtacgccacactgatacccattgtaatcaacgtcatcatggcaggcttatgatttttgacctccgccttggcaccgctgaaaaacggttgcccaccgtatagaaacaggattgtgcctaaaattgcgacgatataatcggaccatggccgaaaaacgatttgaaatggtaaattgacccccatcatcggactcataatgataatcggaatcgtcagaactaacgctacccaaaacttcaacttgagattgcccatgtgcatcatctcaccgttacccatatccatatcgcccatgtcatttgaatcatggtgcgccatgtgttgcatatccatgtctttcataatagcgacctcccctagtcggattgtctacatctgtaatttatggctaaagtttacaattgtagacgataaaagtcaagaaaaacactttcttgactttttgtcgccattcatctgtttcctgagtatcctatcttgaaagtaagtcccttccattagacgcactataactgatggttccgattaaggcctgcacgaatgccccatgatcagttagccaagtatctttaaaatcattctcctcaaaaaatgtcatgttcagattaagaaaatccaaacatgacactcagtgttacttcaatattcgtttataaccacattaacaccgcgtccccggcacacaatcgcagtccaccatttctggcgcatccttggctttttcagccaatactgcctgtaaggcggcgatatccgtttgactcaattccgtttggttaacaaggtccaccagcgtttgaccaacgcgcatctgacataaatgaccgaagagggtgtccacggcttcatccatcgatggctgttcctcaaccattggataataattgaacgctcgaccattcttttcagcacgtaatgcaccttttttgacgagccgtccaagcagtgtcttgaccgttgctgtcttccatcccatcttatccgccatgatttcagcgacctgactactcgtgacattgcccaacgtccaagcaacccgcatgacttcccattcggcatcactgatttcaattttagtttgtgcttccaatggtttgaccacccttcgaattaaattaactgtagtttacaaccgtaaacgtaaaaaagcaactatcactctcgcatggttcaccatctagcatagcgcaattttctttctaataacaacattgactgccattaaccactacccaaatcatcactagttaggttaataacttgattggcgcaaaaaaacggccctaattactgagccgcaacaaaatgatctaataatgatgataacgccgcgacgctatctggataattgctcggatgttgtaataggtaactcttgattttgccgtgatacaataccgtcgtggcggcctgtccgctcgtctgcaataaactccgccgaaattcattgagcaacagttgtaacccgctttgcgctgcgtcttggcgctccaacatcagtgccgcacggctgatagcatcgagaacctgcgtttgcgtgatttgtgattgtgttgacatgtttttccctctatttactgtaatatgcttaagtatacaccgttagtgtcacaaacaggtattatttatctgttgaaaaactatgttatgctactaaatattaattattttagtgacgggggttcagcatttgaaaccaaactcaaaactattacagcgactacgatcatggatgcgtgggcggtacggtcaaaacgatacgttaaaccgctttttaaacaatctcgctttactattgatcgtcatcagttttttcattcgcaccgggtggctactcttaattgccgtgatgctcatcggtattagttactggcgtttgttctctaaaaagatttatcagcaagttgcgatcaatcgcggctttcagcgcttttggtcaccgattattcgcccattcagccgtttaaaataccaggtcaagcagcattggcaataccgctttttccgctgttcacagtgtcaccaacggattcggattccgcgtcatcatggtcgcgttcggataacttgcccccaatgtggacaccaattcgaagctaaagtgtaaccatcgtgcttggatgaaaacataacgattgttgaacataactgatccgcctgcagacctgattttgcttagcaaccacctataataggccaccttagtttgacactgaggtggcctatttacatacaaaaacactattttaacaaccattacgtgctacctttctcgctcaatgaaactgccgacaattgcagtcacagacgtactagttgagtgatggttttcaaactaccgtaaatcaatcctcttttttcagaaaaaacacttacgaaaaaaataattttctggtatgctaacccattgtattcaggaaagtgagtgtgaacaatataatggattcagtacaaagtagcccgcaagctaaacaacgggcccgcgttcccgttgcccatcccatgctagccatgatggggatgttaattggtggttttgttgggatgtttagtgaaacatcactgaacattgccctcccccaattgatggctcagctacacgtgtcaacggcaactgtgcaatggctagtaaccggttacatgcttatgattgggattgtccttccactttcaagcttaattaccaaatggtttacgacccgccaagtgattttatttgccctgattgacttcgccgttggtgcgattatttcggcttcagcgcctggctttggcgtgttattattcggtcgaatgattcaaggtatcgcaactggcctgatcttaccactcatgtttaccgtggctatgcagatttttccaccctacaaattaggggcagctatggggatggtcggtttagtcatcatgttcgcaccggccgtgggtccaacgattgctggagccatcttaggactagcttcatggcgttggattttttggctctttatcccattcttgattattgcctttatctttgccgtcacttcacttaaaaacattgcgaaagtaacccggccgaaagtggacttcttatccattttactttcaatggttggctttggtagccttgttgttggcgttagtcttgctagtgatcaaggttgggggtcgcccgctgtactaggtgccttaattttgggactggttattctggcttggtatgcccatcgacaactcaccatggaatcgccaattctgaaccttaagacatttgctatccctggttttcgggttggcgcttgcctcgttatgattaactttgggattatcttatcagccatgtatttactcccaatgtacattcaaaaggggctgttgattcccgttgccttgactggggtcatcatgttacccggtggcttgatgaacgcaattgtatcggccgtctcgggtcgcttatatgactcgattggcgcccgcactccagcaatgctggggttcttgatttcaatggttggtgccctcatgttggcactgacaaccacgcagagtgcaacgtggtacgttattttggcccacgttatcttaatgattggggcgccattagcgatgtccccttcacagacgcatggtttaaattccttaacgggaccaattgccgccgatggtagtacaatcatgaacacactacagcaagtcgttggtgccatttcaaccgcaattgcaacgagcttattaggcattggccaagcttcttactacgccaatgggggtcatcaagcttctagcgcgttcgtcaacggtgcccattacgggttctactttacgtttattttagcgctcgccggtttgttgcttgcaacccgtttgtctaaaaaaacgactaactaactgtcattaatcaaaactagcgctgttaatcataagcagcctagtttttttattttacgatcgattatcattgaagtagtcttgggtggcttctcatcagcaagccacccaagactactcagtcaccatgcaatgcttagcgttcttaccacactaagaatcctgataaataattgcactttatcgcattttaatgcacaattaaaatgataatatgaggagtcgaaagtaatttatggaattgacaattggtttaattattggcaccagcatcattcttgccatactgtgtggcatactcagtatttactactatcaccacaccaaaaagctgaacggtacgatctgggcactcattggtattgcgctattgtgcctggctggcttttttgtttgggtcgtctggtttgggttataaactaaactgcggctcaccgttactagtaaccaatccgaggaggaattgctcatgaacccagaagacatgtttcaacgttatctcaacaaatatcagatcacgtatcaacatcctgaacatggtctagttatgctgacctcccctgtctggccccaacatcccgagctccagcaggccattcaaagcgcttttcaaggcctaaacggcgtcactagtattacaatcaatagtcccgaacaattagtcatgcgctatcactctgatcagttacggcggctaagtccgctgactttacttagcttagaacgccagttaagcaagcaatatcatcaagctggctattaaacttaatggaacgcaaaaatgcaggctacccggttaaaagtggttagtctgcatttttgcactttattattgatttagaatgttacagctgccatgattttaccttcatcgccgctaaaatcgacgatgtggcgttttaagttagcagtccaagcttgacacccagccttggcaaactgcttgacagcgtctgctagagccagctggccagcaatatattgcttcgcgatttgttcaactgccgcggcatcttcttcacgagcgacccggactgctaagccattcgtccgccgttccacgagataaccgttctcaccaaagtaagttgtggcaccagtagcaacatcatattgaaaatgttgaacgcccaaatcggcttcttttttggcaatcgtggcaaagtctgcgtggtcacctaaattatttaatacgtcatcgatctcagttaatttaaacatcatgacacccctcgttctaatttcgtttacttatctattgtaatccaattagacacgtttggcaggtaacgggtagaaaattcgcattaaagccacgtaaatgaccccgataagcgccatgtcaatgaaagttgcaccagtcaccgtcgcaatccaaacaacgtgcttcaataacaagaagatggccacacctagtacccaacataatagcgcaatccagttcaccccatgatgataccaatactgccccttagagctcgccagttcgttgatatcatagtgctgacgatgccgccaatagtaatcgactaacatcacgctgatcatcggtccaagcaccatcccaatataatctaggaacgccgtgaatgcagctaaaaaactccccatgattaatggaatcagtgtgactaacgtggcaatgattgtcacggcccacagtgctggtcgtaaccgaatccgtgggaagatattcgacagcgccgaaccagccgccaataagtttaccgcgttcgccgtcatactcgttaagacaatcaccagtagtgctaatacccccaagcctagtcgactcgcaatggtactcgggtcagagttattaggatcataagttccagaagtaatcgcgatactgatcgtcgcggcaagcccgataaaggcgaaccagaacaagccggtaaaggcccctaaaaatggcatgccagtcgcgccactctttttgcgcgtaaaccgcgtaaaatcagcacccgctgtcacccaagacaaattgaacgccgctagcgtatccatcccagcccccgccgtcatatgtaaatgtgtcggcgcctgccacgttaacaaatcatgcactgagaccgtctggaacacgacgaccgtctcccataaaacaaataagatgacaagaataatacctaaacgttcaatcatctgaaccgaccgttgaccgaccgaaacactcaataaatgcaacacactcatgacaataattccgaggatcagtcctttagccccaccgggtttaccatagactggccagccaactagatcgtgtaataaatagctgacagaagttgctgcaatgaacgtgtttaccgctgtccagccaatatactgggtcaagttcacaaaggacggaacgtaactgccccgcacaccaaaggaaccacgaatcaagctcatcgtcgccgccccggtcttataccccatgaagccgactaacgataaacataaatacgatagcgtggacgatgctacaatcactttaagcgccgtcaataaaccacacgcagccaatacaccaccaacgtaccacgtgccattattggcattggcgccaatccaagttgcaaacatgtcccaattagacatgtgtcggtgcttaggcgccaccatttctatttgatactttgactcttgctgcacatcgttcaccctttctacaatgttttccattgtagtttttttagtgacgcttggtcaagtctatttaactaagttagttaattgcacaaaacttaaattcgcattaaaataatcttaataagttaattaaggaagtgacagattgtgaagggcgcattgacaggctggcgccggaatctcgctgttctctggctaggaacatttatcgccggaatgggattttctgaagtcatgccattcttatcattatacgttggtcaaatgggggatttctccaaaaacgaactcacgatgtatagtggtattacatacgcagtgactttttttgtcgtcgctgttgtctcaccattatggggtaaactcgctgaccggcgtggtcgcaaaatcatgctgctgcgttcttcgcttgggatggcctttgttatcggtgcgatgggatttgtccataacatttggatactcattctacttcggttcttacaaggcctgtgtgccggctacattcccaatgctagcgccctaatcgccaccgaaactcccaaggaaagtagtgggaccgcaatcggtatcctaacaactggctacgtgtctggtaacttgatcggcccgattctcggtggcgtactcgcccaagttttctctattcgtttgactttcattatcaccggaattttgctactgatcgtcttcgtattgagtctgacactcgtccacgaaagctttaaacccagcgacgcgccgattgctaaacgtgacggcggtctactcagccaatttaaaaatccaacgttgattatcacactgctcgtctccacgatgattattcaaatggggaataattccatcacgcccattattagtctatatgtcaaagaactgatgcataacgtcggcccaatcaccgtcgttgctggaatcattgccgctctacccggaatttcgacgctattatcggcgccgcgactcggacggctcggtgatcaccggggggctgaccgtatccttgtctttggtttcgtctttgccatcctgatgtactttccacaaggcttcgtctccagtgtgtggacattagggctattgcgcttcatgattgggatctctgacggggccctctttccaacggtgcaaacattattatccaaaaatacaccccgcgagttaacaggcactattttcagttggaatcaatctttccaagcggctggcagcatgctcggctccttacttggtggcgccgtctccggctggttcgattacaacggtgtctttatcttcaccgccttgtcattactgcttaacttcatcggcgtactgatctttataccaagtatgcggcacccatttgcaaaacactcggttgattaaccgcgctatttatcaagttcaaaagctatcagcttagtcccggagatcggaccaggacgcggaccggctgacaaacactaatccgactagcatattttaaccataataaaggtcaccaatcagcaatcgctgcttggtgacctttattagttattctattccgttagctcttacttcaaatattttgccatgaactggcttactttttgttgatataattgcggataacgcgtgtatgattccgcgtgaccagctcctggagccacccataattgctttgacttgaccgtcgtagcgcggtagttctgatataccatcttcgtggggacaaaagtatccttagcaccatgaataaagaagattggcaacttattcttcttgagctggtttactgaactcgccgtcataaagttgaagtgggccttcgcttgagctacccagcttgccgtatacagcagtggaaacttcggtaagtgatatagttgattcagctcatatcccaattcatcaccaacactggtatagccacaatcttcaataatcgctttaacttgtgatggaagtttctcgccactcatcatcatgacagtcgcaccacccattgaaacgccaaagagtccaatctgactattttggcctacgcggcgaatcacctgtcgcgtccactttagatagtccaaccggtcaggccaaccaaaaccatagtaatccccctgactctgaccattgccacgatcatccggtgccagcacattatatccttggcgatgccacaatcgaatatagctcgccatctgctccttgttacccatgtaaccatgcgccacaataatcgttttggtggttcggtgcgcagctggtacatagtccgcaactaacttcaaatgatccgttgcggacgtctcatgccaggtctgcttgttgacccgtttcagccacgcttggttctgcttcaacttacttttactcttactagaactatggttcaaaactttcggggtgggttcaaatgcaaagtgatataaataaaaactaccgcccgcgaccccaatgacgatcacggtcaagaatgcaatgagcgcaattgtccattttttgcgtgttgtcatattctctttctctctttcatacctaatcatatctgctaagcctaattcgctttaattcgaatacgctacaagcagccatagcgatattatcaaacgctattctcaattatgtgcctatctcaactcaatctaccaattcgttaagcgctcggatcgttaataaatgtgccgccaccgtttgagctgctaattgaattgcccgtgctaacgggtcaaccgtcgacaagacgaccggttgtccagcaagcgtagactcgaatgcttgccgaaattgctggtaccgcggctcaatctgacgcgaatcacgaatttgcaaaatcgctttactaattactggtaatgaaaaatcagtcttcaaaattgaaacgactagtaccgccacaatctgattccgggtataccgatgtccaaccggccgactgaaaaaatgttgtttcacgtaactattaatcatcgtcttcgttacggcaggtaaccccagcggctgaattgtttcattaacaagttgcaacaactgttccatataaacgggcaccgcgggcaactcttcccacgaaagtaaatagttactagttgatccaaattcctccatcatccaatcctcctcactaccctatttaatttagcccaatttagattttaattcaacaatatctaattgttaccttattataaatagaattataatctacatatccactctgctaattattattcgcctcaaaaattattaaaaggtgcttattttgaaagttcaaaaatagccagcttaggcccgctggaaaaagttcgaatcagcgtaaacatgcttggttggttcgtcctacaccgacttccaggcatttctgccaattgccggaacgtggtgggcacagacttgagccgaaaaatcacgtctcaaatactggcctttcaataaccaagcacaggacacttgctaagtgaaatttcaccactgggcattgtcagaaacgccttccagtcgggagagtattcgaatggcagacgaagctgtacttaacttttgatgaatttgccgttgctttttgtaaacagtaatttggttaatcaactgtcaaactgaaaatgatattgaggtagctcattaatcctgaatcggcatagtaagattcaaactcctgacagagtgcctagtgcaccctaaccctttgtctttgtttaatatcaaaatagtcaacgataaattgtgctaagttaagtggccgttcatcagccattcgagcggcttaccgaaacgtgttcggtgccactaaagcctgtgcttgctacgccaatggactaatgccaaaaccgcattaatccgttggcaggcaatgctcggcttcaacccgtggcccctcgcaagcttgagactggaggggctgggtgacaatgctcagtagccaaattattcttagtcggaagtggtctgcttccggcttagaataagactcgtatttgagaccgggcgggttgtgtacgggctcaaatcgacgtcggcttacgttccagcaattgtcacccagccccggaggtcggaataggacgatcattgctgacgaacagcaatccaaaaataagcaccttttaataatgattcacgccaaatcaaggcttgaaagccaccccatatttccgctaaaataggcttatccaaattttgttatccagaaaggaaatcattatgaataacgtttacctagctgcaccgttttttgacgaggctcagaaggaacgcatccaacaagtgaagtcggcgctgttggctaacccgacgatcaaccccgatggtatcttcatcccagaagaacatcaatttgaagaagaaccttttggtagccgtgcttggcaacaatacgtctacgcatccgatatgcgtcaagttcatcgggccgatgtcgttgttgccattcttgacttcgacatgactagtgcaaccaatgagccagattctggcacaatgtttgaaatcggtgcggccgtagctgaaaagacacccgtcatcgtcgttcagtttgatgcgaataaagaactcaacttaatgattgcccaaggattaacggcctatttcgatgctagtaaagatggtctgaaagaattatctgcctacaattgtgatgacttacgttctaagcccgctcaccggccagtattttaggcacacaacttaatgacacgaaaaaatgctgcttgcaaacgaataacgtttgtaagcagcattttaactaacttgaattgataatccttattcagcagtattcacgactaatcgtgactgtcgccgcgcctgccagcgcttattcaattccagcacgaatgttggaatcagcgtagctactagcaccgttaaccagcctaacgctggtagtgtcactaagctaaagaaactacggaacggtggtatcactgcaattgccaagaccaccagaattcctaacagcaatcctcggttcagcattggattacgcatcatgcttggccagctgagtggtcggcgatccttaattgcatagatgtcgatcattgatcctaatgccaatactagaaagaccatcgtcatcccgactggggcttgaccatttgttaagccaaagcggccaaacgcgtaaattccgagggttagtacggtaaaagtagctgcccggataaacaaccgttgaccaaggccccgagctaaaatactttcgtcattggctactggtggttgttgcatggcttggggttcacctggctcttggctaataaagaatcctggaatcccatcagcaagtacgttaataatcagcaattgttctgctaacagtggcgccccccaaccgaagaggactgcaccaaccatcaagaagatttgtgcaaagttgacacctaccaagaattcaacggctttaatgatattctgataaactgtccgaccttccttaactgctgccatgatcgtcgcaaaattatcatccgttaacaccatgtcagcggcttctttagatacttcggtacccgtaattcccattgcaatgccaacatccgccgctttcaatgccggcgcatcgttgacaccatcaccggtcatcgcaaccgtcttaccaagactttgccaagcctgaacgattctaattttgtcactcggtgacactcgggcgtacactgcaatctgatcgatttgagccgtcaattcttcatcgctcaattggcgtaactcatcaccgctaattgcttgcagctcagaggttaaaatgccaatttcctcagcgatagccttcgcagtaaccaaatgatctcccgtgatcataactggaaaaatacccgcctgtttggctgctcgaatggccggaatcacttctggtcgtggtggatcaatcaaaccaatcaatcctgccaattggaggtcagctgtcaggtcgtcccagtcagtagtttggacatccgcgggaatgatgcgatagccaacagctaaaacgcgaagcgccgcctgcccaaattcatcatgggccacttgtccagcagctaggctagcttggtcaggcttcagtggtaaccgatcccaagcccctttgacgataactaaccgtcgaccatgcgctaattcatgcaccgtcgtcatcatcttcttagttgagtcaaacgggtcttccgcaattcgtggggtctgcgcctccaagctgggccgatctaaatcatactgagccagccaacgaataacggctaattccgttgcgtccccaatagcttgttcttcaccgtcaacgtggttgatctcggcattcgtcgctaatcctaagtaacgcatcaatgtttgtcccgctgatggcaagggctgttcggtcgtcataatgcccgtggtcggcgtccaatactttgtaattgtcattcgattttgcgtcaaggttccggtcttgtcagacgcgattacatcgacactcccaatcgtttcaacggcactaactcggcgcatgatggcatttctgtctgccatccgtcgaacaccgtgtgaaagactaatggtcacgatgatcggcagagtctctggcacggccgcgaccgctaatgaaaccccaatcatcaagctatcggccaaaccttggttttgcacccaaacactcagcgcaaaaatcgtaataccacctaagacggcaaatgtcgttaaccagcttgatagccgattaagccgcccctgtaatggcgtggcccgttgcttcgtcttgttcaacaaacctgcaatttgacctaactctgtggccattccggtcgttaagacctgaatcaatgcagtaccggctgtgacggccgttcccgcatacacttgacagttatcatccaactcaccggtgtcctgataaatacttttttcaacagcttcactttcacctgtcaagactgcctcatcaacggctaagttcgtggcctctaacacgaccgcatcggctggaacctggtcacccgcttttagtagcactaaatcactgggaacgatttctggtgccgcaatcgtttgtaccttcccatcccgtcgaacattagctgtgggtaaactcattgacttcagtgccgccaacgacttttctgcggaagcttcttggtacaaaccaatacagacattaataactaaaatggcgccaatcacaatggtctttgtccagcccccattctgggcaagagccaagtacgtggctaaaccaactgcaaataataacactagcgatgaaacgtcgctcatatgttgccaaattttacgccataacggtacggggcgcgcagctactaattcatttttgccgaatttagttagctgggtcgtcaccgctgtggtcgttaaaccggactcgggggtaggtttgaatggtgcattctgataattctgcatcgtttattcctccgtaattcgattatcgttgtcattcgtcactattaatgatagcggaaacattttgtcgttttacgtacaaattgtgaaaaagtcgtgaagattagaacgtacaattaaagcagccattaaacattaaccacaggtcatcatcaaaaaactgttcaatttatgactaaaatcaagttaccagccatgaatattgttataatagaacacaaatattccttggaggcacgttatgaaaatcaaattaatctcaactagtgatgtgcacggttacctcgcgccaactgactacagtcgtcgtgataacatcgcaccatttagtcttagtcgtgccgctactgttattcatcaactgtcacgtgaagatacggctgatgtctggccaatcgtgattgataatggcgactacgtacagggatcaccgttgacctatttcattgctcgccaccaccaagaagctgcaccgttatactcgcgccttgcaaattgcaaccacgttcaagctggtattttcggtaaccatgaattcaactacgggctcgactacctcgacctgtgtgaatcaagccgccaatatccgatgctggccgctaatattcatgatgacctgcaccgcaccttattctccaagccatacacaattctggaacgcgccggagttaaagtggcaattttgggactaacgacgcaattcgttgcccactgggaacaaccacatcacattgccggcctgcactttgaggacgtggttgcaactgctaaacattgggtgcccaaattgcgccaactggctgacgtcgttgtcatcgcctaccacggtggtcttgaacgcgatccccaaactgatcgtccaaccgaacacatgaatggtgaaaaccgaggttccgcactattagctgaagtccccggcattgatgccatgattactggccaccagcatcgacaattagccgttacggttcacggtgttcccgtgacacaacctggtatgaaaggtactaatgttgctatgattacccttgagctcgaccgcaatcatcaagtgacgaccagtcatccggaaatctatccggtcgcagatgccacccccaatacccaggtaatgcaactagttggaccaatcaatgaccagatggaagactggttagacacaccacttggccaaattaacggcaatatgctcgtacacgatcatcttcaagcacggctgcataatcatccttacatcgattttattaatcgcgttgaaatggccgcaaccggtaccgatattgccgcaacggcattatttaatgacgacgtaccaggcctcaaacaacacgtgacgatgcgggaagtcatgaacagttacgtctacccaaacaaacttgccgttgaagccattactggtgctgatttacgcgccgctcttgaacgttgcgcgagttactttctcctccaagacggacacgttcgggtcaatcccgagttcatgcaccctaagttgcgccactatgtctatgatatttacagtggcatcgactatactttcgaccttaccaaaccctttggtcaacgtgtcgttcaactcgattatcatggggccccagtcaccgctgaccaaaaattaacggtcactctgaatcattaccgcgctggtggcggtgggaattacccaatgtatcaaacagctaagattatccggcgcttacctactgatatgaccgtattaattgccgactactttgcgcaacatcccgtcgtcaacgcaacgcaaccgactaattttcaagttcactattaagactaacgcgacaaacccgctcaaatatgcactatttgagcgggtttgtctatactgacgttcacaacgtctggtttagcatcgtcgttaaaccgtgccaattaacctttgtcaatcgggaatcataacagcactgaccgcaagtcgtgccctcctttgtgggcgtctcacaaacccagcatggtaatcaaaaggtgcccgtcatacgagctgcaatccccacattaagaatcccatggtcagcggcgcaatgaccgtacttaacatttgcgtcgccacatactcatctggtgccaagtggttttggacggccaacatggtcgcgatggttgcagtggggattgcgagcgtcaggacgactaattgttggttacttaatgacacacctagactagccataatcccccaaatgagcaccggtaagcctaaatttttcagtagcacgtttaagacaaccatgcgcgtcagtcgccacggtctagtcgttaacagaagtcccagcgcaaataacgccacgcccccagctgcttgtcccaactccgtaaaattcgttagccaagcactgggcaaccgcaatccggccaaatttaagagaaaagcactgattggcgcccacacgactggttgccgactcgcacgacacagtttctgccaaccggctcgccaacgttgctcaggtgtcgaaccgcccgctagcgttaacagcaacacgctcactggcacttgtaccaaattcatgtacaggccgcctaacgcgaccaataaaacactgattttaccaaaaaccaccagtaaaacggaaacacccatgaatggaattgaaggactggcgatcactagcgctcgtaatgtccccgtttctagttgttgatggaaacagcattggctcacaatgacgataaccatgccacctagcatgcctagcgccaaccacagcgctaccgaggagttttgaataatggtagcgcgctttaatgacaagattcctccgaaaagacttaacggcaaggcgtaatgcatgaccaactgaatcaaaatatcactggtcgttggcgcaaattggtgacgtagccccgcaaacacgcctaatcccaccgtcacaacaattggtaaaattgctaatatcagtaacattcacaggcccccagacttaataattaaaactgagtgtaccatagtccaatcgctgtgatagtcaggttgctagtcaacaatcggacatcttatgacgtttcattagtctaattaggggcctacctcatattattaagcggccgcgccacactttttacgataacaacgaattttctaatttaactagctgactcccgacaattaggtgattagccaaataaaaaggatgctgccagtggctgcatccttaataacaatgaaacttagaaattaacttgatcaggatcattagctaacccggcaacaccgtggaaaccatcaatgaccttcatatcatcatcgctgagttcgaaatcaaataattccgtattttgtttaatccgatccgcatgaactgattttggtaatggtaagaaaccgtgttgtaatgaccaacgtagcacaacttgggcaacgctcttatcatacttatcagccaacgtctttaattctgggatactgaagatcttaccagtacctaatggactataagcttctgataaaatgtcatgtttgcggttgtaggccacaacttcatcttccatatcactaggattgaggaagatttggttaacggctggcacaaccttggctgtcttaagcagcgcgtctaaatgcttaggacggaagttagaaaccccgatagcccgtgctttacgtgccgtgtaagcttcttccattgcccgccaagtatcggcgttcaattgttcccaattgtcgcgcattgcggctgggtttggccagtggatcaagtagaggtcaacatagtccaaacctaacttagccaacgaggtatccagcgccttcttggcagcgtcatagccatggtcggcattccataatttggtcgtgacaaataggtcttcacgtgccacaccactatcggcaatagctttaccaacactttcctcgttaccataggccgccgccgtgtcaatgtgccggtaccccgcctttaatgcggctaatacggaatcgtaagcaacctgaccatcaggtgtttgccacgttccaaaaccaacaatcggaatcttagtgccgttatttaacgtgtacgtatcggtgagtttagtcaatgcagtcatcaaaaatgcctccaagaatttatttgttaagataattctacccataaccgaccacttccggcaaacattctgttccaaactaatgacgatacgcaaaattcgtgagaaaatataaacattctgatgtgggaggggttttgatgagcgatacggcagttatgttaaaaaccacgttattggccggcgccattttgctagaaaatggggctgaaatcaaacgagttgaagacacgatgcaacgaattgcaaccaacgcgggctaccctgacgcgcaggtcttcgtactgttaacagggattaccgtctccttgccggaaaatgccactagcgaagtgcgagcaatccataatcggggtatggacctcgaaaaagtggatcaggtcaacagcctgtcacggcagtttgctaatcacgatattgatttaactgaatttgccgcagccctcgaacgggtcaatcaagccgtaccgaccttcccattcagctggttatgtctagcggccgttgtcgttagtgtgccgttgatggtcgcctttactggacggacaactcctgccgacttgattacttgtgggctagccgggttggctggttttgctgccttttattggatcaatcggctggggtcaattcggtttctcagcgaatttatgggcgcttttattattggtctaattaccctactcggcttttatctcactaacggtcattatcatcccgacgccatcattattggcgctgtgatgccattagtgccgggtgtcgccattactaatgccgtccgtgacacaatgacgggtaacttgctgagtggtcctgcccgcgctgtagaggccgttttatccgcgtgtgcgattggtgttggtatcgcactgacttcatttttctactaaaggaggcgtgacatgctacattggctcttaacaaccggtttatttcaaattatcttagcttacttagctacggctggttttggggtacttctcaatattccgcgtcgcgccgttaacctcagtggttgggtgggtgctgctggctggtttacgtatgaggtcctctatcacatcctgccattaggaatcgacgccaaacttgcgattggtaacctcgtcgcagctatcgtgattggcgtcgctagcggtatggccgcacgctacaaacgaatgccgatgatcatctttaatatccctagtctggtcccactggttcctggtggccagtcttatcgagtcgttcgtaacttggtcactggtcaaccagacttggcctaccagtactttgtacaagttgtcattattgctggcgtgattgcaattggctttctcgtcgctgaatttatcaatcgcattactttacactttgtttaatcaggaaaatcagctagtgcatctttgtcggttagcaaaatgacaccacgttatcttgatttacagctgttagacttcttaaatgattagcaaaaaaatagataacgccttttactaagtacttacaataaaagtaagttaataggtctaatatagttcaaattgtgggcttataagcctgcaacatttacaataataattgtatttaacccgagattttctaacttggagggagaaaagctcaatttattatttagatactgacaaaataagcttagagaaaaagaaaaatacccttggtaagattggcataaaattattaccttcattaatatttttcaaaactgaaaattcaattaaaatactgcctaattacgattctacagctgcaatttcaatgtggttgcgaagccttaaaaggtagtatacgaggagaatactacaatgaatactaggtctaatcatctcatcgaatggctgctcaccttattattaataatcacaattctgataaatgttggttggtttatttttcgatatggcggtcattactactacatgaaaatatcgagtagtaccggaacttccccaattacactaccggtcaatgtctcagctactgggtatcaataccaaggactagcaactaattctaagggcgaaaaaaagtatcttcattttaatacagttgctgctgatccagccccattcaaacgcggacaaattgtcagaatcacattcaatcaaaggtacggcgtaaccaactataaattagttcatcggtaacacgattacttcaaaaaagccgtcataacgattggtctatcacttatccaatcgttatgacggtccatccattactagaatgatataatctaaaaagtcagcaactaatttatagtcgctgactttatttattcatgatatttgcggcaacaagcttagccaaaagtgacgcttctagtatttaatgaatcaacgtaaagtagccaatcacaagtacccccaggacaattcggtaccaaccgaacgccttgaagtcgtttttcttgatgtaatccaacaagaaacgaatcgacaagtaagcgactatgaaggacacgatcaccccaacggctaagactgctccttgcaaaccagctaaagaaccaccgtgagcaaagaatttcacaagcttcagtaatgacgccccaaacattgttggaattgccatgaagaatgaaaactcagttgcgacgtagcgtgaagttccaatcaagatagcccctaaaatggttgcaccggaacgtgaagtccctggaatcaacgagagcaactggaagcacccaatgaacaatgccgtcgtataaggtaacgtttgtagattagcgaagcggggtgttaagcgcttattatgattttcaatcacaatgaataggaccccataaataatcaacgtggcagaaacgaccgcccaattcattaaatgttcgtccatccaatcatttaacggtagccccacgatcactgatggaatgaccgctaataacaccttactccagagaacccaagtatttcgcttttccgtggtatccttgcgtggtgacaacggatttagtttatggaaatacaggacaacgaccgccatgatcgcccctaattgaatcacaacgttgaacatatccgtaaactgcgtggactgttgcatcttgataaattcgtcaactaggactaaatgccccgttgaactaattggtaagaattcagtaatcccttcaacaatccccaagattaccgctttaaaaatatctaacacaatggattcctttcttgttggcaatgattatcgcttgataatcccaatacataaagatttacgaccatccccgatggccggtatatcaacattatagcaagcagctactcaagatagtagcgtccatgtgtatttttttggtaaagattaatttgtcagcgctgccaacgccgtactaaatacattttgcgtttggtcatcaaaacaaacaatcgtgattgtctgaaccgtgtgggccgttgtctgcgcaattgcttgtaacgtttttaacgctaacggtgccgcaattgatagcggaaagtgatagacgccggtactgatagacggaaaagcaaccgtttgacaatgattctcagcggccaaattcagactgttgcgataactgttcgctaacaattgtaattcattatgctggccaccttgccaaacgggacccggcgtgtgaatcacatacttcgccggtagtcgaaagcccggcgtaattttggcttcaccagttgcacaaccgtgtaatgggcgacaggcagccagcaatgctggcccagctgcccgatgaatggcaccatcgacgccgccaccaccaagcaaactcgtattggccgcattaacaattgcatcaacggtcattttggtaatatcaccgtgaatgactttaatctcaaccatcttaaactgcccccataatcagattaacactcgtttgggcctgttgttttagctgtgccccactaggatcctgttttgccaataactgaatgccgctgcgaacctgcattaaacttgctgcagcctcagcgaccgtggtcggtaaggttttagcctgaggtgaaagtaaaccgacgagtcgggtctgtaaatcagcatagatcgtttgcagttgggccatcaaggacgcatcctgcgacccaatttcggccatcaggttcaccatcaaacatcctgctggccaccgttcactctgaaacggcagtcgcaaacaagccgcaattaaagcgggcaatggtgtttgccgcgcccgctcacgttgaatcaattgatcaagttgttcatctaacgttatttgatagcgttcaagtgaacggcgtaacgcaacccgcttactgtgatactggcgataaaactgcgttcgtgacaactggctaacggtgagcaagtcgtcaactgtcgtttgataataaccacgctgccaaaattgaatcatcattgctgtttcaaccactgatgcgtccttaacaaccatgctaaaccctcctgaacctaacgctactacattaatcagcaattaaatactgaattccgcgaataatcgaccataagtagctagccactgcgactaatccaaataccgctaaaagaaccacggccaaccagccactattaacgatactgtccatataaataccgctaacgcctaaaataacgagcagtgtaattcctaaaattgtcggcaacaaatgtaaccaaaaagcccgtcctgcaacccgatgtgcttctggattagtactcgtcagcaaccaaacaattaatggaaataaaactggtaagaataaaatgcttaaatagctcaacgcgttaatcacccgattttgtgtcattgttataacctcccccgatatttatttcgagtatagcgaaagtctggtacttcggcaaataataaacaaattgttaaaatacttaggactctcccaaggttacgcgccgaatgttaacttacgaccacggtctgctataataatgacataacctaaccttgcaatcgctagttgccactgtacaacccgggagcgaacggttcatgttaggatttaggtgcattagttaagatgcggaggaaaagaaaatgacgaaacgaatgagtttcaaatttaaatgggttgccctcgttgccaccctgatcgttgggattggcagctggcaagtccttgcgcacgctgacagtagcagcgatgaaccaattgtcacattaggcagtagcctgactagcagtcaaaagactgggacgatcaacacgttaacggctagcttgaacggtgccgattatcagacgctaactgttaacggcgatactctagttaaatacctcaacccagccggtgaaagtttcacaagtagctcaggtgtgtggtccagtgcgatgattcaaaaaacaagttctggttctggaattaatgtcaaaattttaaattataatggtagtaataacatcaccactattacggctaaccagtataaaaacgccgcactaacggctgggattaccgatgctaatatttacgtcacatcagctactccaatcgacggttcgggcgcactagccggtgtttacgcagcgtacgcaaaatctggtaacagcttaaacacgaagcaagtaaccgccgcccaagatgagttaagtactctcagtggcatcacccaagcaaataagagcaaggatggttatactgattcccagttgaacaacgctgtggctggtgccaaaaaggaaatggcccaaaaaggaagtaacatcactaaaaacgaaatcacgaccattgtcaatcaacaaattaccaataacaatttaacaaatgtcattactaataatcaaaagactgaaattattaatttgttagtcaagatccgtgattcaggtgcattagattcttcaagctttaagactcaagccaactcgttgatgaagaacattcaatcaaatgccaagggtgtcttcagcaaactcaatactaaagaaaatcaaaacttgctccaaaaaatgtggagcgcgattgttaacttcttcagctctattttcaaatcaatctttggctaattattaatctcggatactcaaaatcggacgacaaaactgcaatcagttttgtcgtccgattctttttaagccttgaagcataccattaaataacgatcactggcttggcaaactattcaattgccaagtgatagttccagaataatttttagccatcacacgaccacccttgacgtgcaacgcaacgttattaacattccaaatttgttgattagtcccgacgccttgttgactagtcgtcccagctattaacgtttgttgggtagcacctggggttaacttaatcacggctggtaaggttgcctgattttggtcagttgccgtaacccatttactagtactagcattcaaatattgcgctgttcctgatgttaacgtcacgtaactacccgtcatggtcgtcccatcagtagctgtcaacgctgataattgggccgtcaattgccaaccacttggggtgtcccgtgtatcagtcacttgtgtatacacactatcctgcccatttttctgaccaccaactgttgcatacttctgtccatcagtagcagtagccaattggtcttcagcggctgatggtgacaacaatgggtacgctgtatccattgttggaatgctgtgctgtccaaagttcaaatgtgtaggtacagcgtccaacgataatgggcccaaattgttcgtcccgccagtcccaggcttgctaggatcatcaggatcaattggattgacgattaaatccttagctactgtaaatatcggtgctggttggaaagtcgcatcatgatactgctgcccatttggataactattaggatcaggattacgatttcctagactatcagccatataaataataatcttgtcaccaatttttaacgataatccggttaagttcagtgaccaagtcccattggcattgacaaccgttttgacattagtttgaatctgcccatttaatgctaatgtgacctgcgcacctggttctccattttgaccactcaccgttcctgttgaaactctaatggggtccggtgataccattgtggccggattaggcggcgtcacatcaaccaccgtcccggtagccgtgaccgtcgttccactggtattgctagtcgatgctgtgaccgtcgttccagcttttaaaaaggtcccgacattagctgttgcgtagccattactatcagtttgggcagtgattgtcttaccattaacgctataactcacggttaattgccctgcactagcatactgtggaatataattaaccgttccgtcatcttgaacaccattagtatcaggaaccatcgccacaatgactcgcgtccgcagcttctgatccgcatctgttagtttgtttgtcccatcatacggattattaaatgctaattgtggcttctggttagtggcactaatccgacgcattttagaagataaataattactttgcaaattactatccgtggccgtcactgctgaaccctgttgtaataactgagatacgttactatacgaataatccgcaccgcccgtaaccgatgatgctaatttccacaagctaatattactatcttggatttcaaaagtgcccacattatcttggttaatcgaactagccgctgcagtcgttccagttgagctattacgtaaatccaagttgttcggattaataaatcgaacagtagccaaacgcgcgtaatttcccgaaataagcggtgctcccgtagcagcaattacataaatattggcaccactactactttgaatcgtcgaagttgcattatcagaaaaagagattggcgattgacttctagctagtgacgttagattaacggtgctaccagtatccgcgtaaaaattacgatgatattgtgacccataaaagtacttgttagagtatgcatttcctggcacgctagcattaaacgtggcatttttacccacattaatactttcatacgcatcaaaaataaccggataggtagtataggcggttgacgtagaactagcaggtcgtcgaatacaatttagcgtcgcgccttcttcaacattaacttgccgattaccagttccttgatagtcataaacaaaccagataaatgaattatcatcaccattggctattttcgatccagtgaatgtctgtccagcagctacatcaaggccaccacataagatgttttctcgaaccgttgttactcggcaattgccggtaatattgacttggttcccttgcgcactgacaaatcgccgacttgtattggtataactagtcccacttgggaccgtaatattactaacattaaatgtccaattcaaagcccctccggcaccatcgccaccggtggatgagccaatcaaacccgcatcatttccaaaagatccgattaatgatgcaaaattcataaaagtggccgtgtacatcgtaccgctagttgcagtattatttcgggtatgaaaaccagcccgaccaatattcacgctatgaccatttccattcacaataatattaccggataatcgtgaatccaaagcacctgaagcggcagtcggattactaatatcagccgtaatattaatttcatcaacactcgcatccttccaagcatcgactaattgagaccactgactaacatcaaccacattcgaactcagctgagctaaacgagtgactggtattaatggactagatttggcactcgccgttgcttgcttagttggtgctgatgagaacacttgactagcagtggatgacgatgagatgctggccgaactatcagttgtctcacccgcagattccgtgaccgatgacgattgattagcagcagtttcttgtgaaggctcgctactgctagcactcgtttggtttaccgcctgacttgaaagcgtcgttgccgctgaacgtgaactgtccaaacttgctgctgatgatgtcgcttgtcgacttgacgatgccgtcgaactatttgtatcggttgccgctgaagaactagctgaactcgtactggcctgatcagcctgcgtttgtggttgcttaatctcgacattcaacgccggccctttttgatcatcggctacagcaactaacgccagtttttctgctttaacagctgttaatctaattggtaccttcgtttgcggatattcatctgaccactgaaccgttatcctgcgcttatcaggattgtacgaaactgtcagatgcttagccgtaattgtaaaggcgccattatcccccgttgtgtactgactatcatcgaaaactcgttttatttgcttaaactcctctggcccatctaaattaacctcgttcggtaaatcaatcgtatttattttagaggccgtatcaccaatctgtagttcaacatcaaaatgttgattcgttaaaatattatcgctagccgttgattttgcaaaagttaactgtggtaacgtagctgcttgagcggtcatatcggcgcctaagcttaccgttgcaccagcggctatgacttgtaacaataccatcaatatgacaacaattgctcttagctttttgatagtatcaccccttagcgcttattttgacgccgtttaattacccagaatatgattaaagcaatgagcaataatactaacaacacgataccaatcaaccaaccccaagtagttggagacgtgacgttaacagcatccgtagcgccaactacaaaatcttgctttagcgaccagacatgcggcttagcgaacttttcatccgtagttcgatacttgacgtatagagtgtaagtcccaggtaaaatgatcccccgattagtacgccactttaatggtaagtcaaagttagaattaggagccatcgaactactttttagatcagccaccgcgagctttttggtctgcccagctttgctaacgtaggcagtgacagtccctttgcctagaattgaagcgtggtaattttgaatattaccgataactgtcttgatgccactccgcttttttaattgaacatcagccaagcgtaattttggcaatggatcacgatttgacgttagtttgatccccacattgtaggcatattcgctagttaacgtcgcccccttggttttaagatgttgatctgcaattttaacttgccaacttcctaaaataatccctttgttcaatttcgttggcgtttttaactgtgcccgcacgatccgtgatttattagctgggatcgtcgtttcctcattcggtacggtaataatatcagctagttttacttttaaactagtgtcatcattcagattagcagcaccataatcaataacacctttcgcattagtatacgattgtaggaattgatttttgactttaatttcatgatttgagcgattattaacacgcatcgctaacgaatatgttctcttcggttgaattttaaaatcccaataataagcgtcctttgataattgttgcttttcattaagcattggctgaacatcaaaagttaccgcattattggccgtgtcagcagcatggccaatcacagtcataccagccaacaaagtcattattagggttaacatccctaataatagcttcttattccagccgttcataaaagggcctcccttcaaaaaaacgagttaactattcaacatagccactcgttttcgttcattaagccgttggtgtcgagttcaatgtccaaacaatattccctgaataattcttagcggctgcgtgaccacctttaacatgtaattgcacattattaatattccagtattgttggttgacccccataccttgaccgtcaccaactttagaccctgccgtggctgttgcaacatcggttgtcgatgaagcgccggcattgagcacaattggtgttgcaacggttgcctggttcgcatccgccgcagtgacccaagattgttgattagcttcccctgtcagatattgtggtgtcccaccacttaaaacaactgacgcgttcgttaacacttggccgtcagaagccgtaatatcagaaagctgtgcctttaattgccagccagcaccagtcccccgtgagtcagaaacttgcgtgtaaatgatatcattaccatttttcttaccactagtcgtcacattttgggtcttatcatcattagctgtcgcaaggctctcctgactagcatcttttgaaagtaaagtgtaggccgtatcaacattaggttgcgtatgcgtcccaaaattaagatacgttggtaccgcatctaacgaaagtggcccgttgttcccagtaccaccgccgccaggattatccggattgtctggatcaacaggattagtcgaaccaccgttagacgtaaacgaaacatctgcttgagactttccagttgaaggcaaggtgtccgcggaagctcctaaattattgaatgataaacaagcaatactggctactgaaaccagcatagctgctttgagcgtacgtgactttgtcataagtcaattccccctaaaatttaattagcatattaatcttcttcatcaatagcgcgtaatacctttttgtacaaacatattaatatttaaatcaatattataaactcacctttattaataaacttttagcaaactaattgacgaagaatatttatatgtctatactggataacttaaatcagtcattatccttgaaccaattaaagcataccaattaaagttaatcaagtacactattatgtacgtttactatttgtataaaattcactatttttgtaacttatgggggaggaactgtccattgaattttccagagctcaaactttctcaaacagaacgcgatttcaattttgattttactatattggaacatgatttaagttattttttcgaaaagcgttgtcttgactacgccttggaacatatcaatagatttaatcacaaaatcaaggataacttatacaacgtccgcccactcattctaaaagaagccttaatttcactaacctgtgatctagcaagtgtcagcttttatcattatttgaacatgatcacattcgttaacttaagaaaggacattttgcattacctcacaacaacaacactaacgaatgatgattttatgccacttttagagtcaatcgttaacaattattttagcaatcttgatacacttgatattccaattgatggtacccgcctctctaagcaagtcgcgctagttgtctattatattgataatcattgtgatgagccattaagagcaaataccatcttagaagaactgacgttagatcctgaatacactaagcgtaaatttcgtaaagaactagggtttaccatcaacttctacattcgccacgctaaattacagcgagcaaagcaattattaattaatacccatcttcctataggtgaaattgcagaaagaatcaacttctacaatagcgccgaatttgcacgccagtttcaaaaagaattcgatattactccgagtaaatatcgcgagttgaatcaaattttttataaagaagaataaataggatatttactttgtacaataaaatatttttttgtgttttaaaattcgcatataagtttaatcactcttaaacttgatattaattctgcaatatcaagcaagctcctaaccaaaccttgaacgcgctattaggttaaaaggcaaccaaagttcatatgagtaagacgagtatttgtccgctcgtcttatttatacaaatcacccaatcaatgtgactactatacaaacagtaagcgctcactttttccaaaaataattactaataagtcttattttaagtacaagcacggattatatctgatagcgcaaacaaccagcttgacacctattaccatcgagacttcatagcacctatcgtcttgatcatttccgaatcacgatcagtggtcattaatgattataaaaacaaccctgttagcaccaaaagacgccaacagggttgtttttgtaattatctttaattgtaactgacactcaattaagcttcagcccgcttcaaatcagtatcagcatacgttgtctttttagtttgcttgctagcatcttcattaacaaacttgtccataaactcttcaaccaagttcaaagtctgatattgtttagctaaactgaagctttgacgccattcccggttgcgttgaatcaattcagtaaagacttcatgttcaatccgagcgccttctggtgttaacttcaaaactttgttacgacggtcatggtcttcagcttcttgatataagtaatctttccgtaataagcgaccaattaagcgtgagattgctgaacgcgtcacaccgtgactttcggcaatatccatcagacggatcttaccttttgcttcagcaatatcatataaaatgtaaaattcatccaaagtaatcccatgttccgttgcaggttcagcaaacatatctgataagtttttaaagccatgtaaatacatatggctaaagcgattaaaaaattccatatcttcattcattattcaagtctccctttcactagtcgaattatcattaaattcccaatcataattcgccccatacttttttcataaattagtaagcgtcgtttatcatttccctgctttaaagtgtactagtatattttacgaaatacaagtaatttagattactttaatattaaatttttatttcagtactcaagtcaagggtcgcgtgtttatgcagatacgtgatgaattgctgataataatagtcagtattatacttggctgtgctcaaataaatttgatcaattttctcagtattctcacctaataacaagtaaaacgcttggtcgatattttctgcaatcatgccaacactagctcttagaattttacgcttgaaaaaaacagccataccaccagataacgcgaagttcaacgcgtatctaatcatagcagcttcaccttctacgccgatagcttctagccagtctagtgtcactagcaccatctcagtcgtcagttccggactctcgaagatgtcctgaataaagtgttccatggtcggattttcatctaacatccgcaaaacaaagctcatttgaatcattgttcgctgatacgaagacagcatggtcagctgttcattactatagataaaagcactaagcgtcaactcatttaacatcgtacttaataaaacgattttcttcgggaaatagtgttgtagcaacgacttactgatatcacaggcaatggcaatgtccttcatctgaacgttcgcatacccctgctcggcaaacaagcgaaacgctgtattaacaatctccattcgccgttgcgtgttccttcttcgtggcaagaaaggtgcctccctatcactgattttcaatcattctcttttaataaactatactaatatagctttgaacgcaagtgataatttaattggaaagttaattaataacagcctcaactatcaaaatgatcattacttatcaataaaatccgcgagtacttccaactacaagttagttaacaaccactgcggcttaacgtcttaatcgtctaaacgcactagcagctattcatcagccaaaaaagaaaacgctttcttatgtgaaagcttgtgctaaaattaacttatcaacttgcagggaggctacaatatgagcactaaaaattcttatcaattagccgatatcggtcgccataatccgatcttttcacagatccgttctaccgtcgaaacggccttttacggtaataatatgcaccacgttgatgatatcgctgccgcttaccaccgcgctactaaggaccccggaaccgttattacggacctcccaatctatcgcgcaacggatttaggcttaccagctgatgcaaaaatgttgattgccaatacgggtaaggttgttggccgaaccgcacaagcgcgccggattctaggcaacccgggcgttagcgaagccgatatggccggtcgcctacgccaagcactatttgctagtgctcacaaggacttcatcacgacggacgttctggtcggtttagacgaagacttcatcgtgcgggcccacctcgcgattccggacggttttgccaataatctactttcttacatgcttaacttccagcccatcatcgctgcttatcaagaaatgttcgatcggtccgttgcttatccagaaggcgatatttacatttacgctgaccctacttaccatgatccagattatccagacggcctggctatttttgatccgcaacataatacggctgccattctaggaatgccatactttggtgagttgaagaaatcgactttgaccttagcttggtcgatcgcccatcgtcacggcttcgttgcttgtcacggtggcttgaaggccttccacttcaaggacaagcaagaccaagtcttcgccatgttcgggttatcaggttccggtaagtcaacactaacccacgctaaacacggctataaatacgatatcaccgttctccacgacgacgcctttgtcatcaatcgcaaggatggtagttccgtggccctcgagccttcttactttgacaaaaccaacgactatccgatgacgtccgatgagaccaagtattttatgacgatccaaaacgtcggcgtcaccttagacgatcagggtcgcaaggtccttgtcactgaagatctgcgcaacggtaacggccggacgatcaagtcacggtacgcttcgactaaccgggttgataaggaagccgctcccatcaatgcaatcttctggattatgaaagatgatagcttaccacccgtgattaaagtagatgatcccgtattagcagcgacattcggcgccactttagcgaccaaacggagctcggccgaaaatattattggtaatgtcgaccgtaacgccctagtgatcgaaccatttgcaaacccatttagggtctatccactatcagaagattaccatgatttcaaggcactcttcgaagaacgccatttagattgttatctattgaatactggcttctttggcgataagaagattcctaaggaagttaccttgggtgcgctggaagccattgtcaatgatacgaccgagtgggagtcattcgcaggcttggagcacatgcaaaacctaaagttagctgatttcccagttgattatgccaatgcagactaccgtaacttggtcgccactcgtttaggaattcgggctaacttcattgatcaatatcaacacaacaatcatgaccagcttccccatgagattattgatattctggtccacctacaagatcaattaaaacaaccaattacaaaataggatggcattcgttccccgcttcagaccaattaaggttataataaaagtagcaggtatatggcactgaacttttacgaattctaaaaatcggggtgaggagcatggaactaccattaagtcaattatcagaaaagctcatcagttttgaacgcgagcaccatcttacagataacgaccttgcgtttggcagtcaattatcagttgaacggattcacaacattaaatctggtgaagcaacgccaactcaggaagaattgcaactgttgaagaaattcatgaatagcaaagccaaagcttaactgctagttcagcgataaagcctaattggggcaaagatcctcactaaaaactggtcgtccattcgaccagtttttttgttacctaccatccagattgcattttaatttaccctgttatcacctcgtgctatactcggcacaacttataaagataagggtgaccaacatggcaatgttatacggtaaacacaatcatgaagctgaagaatacttggaaccagtctttggtgcgccttctgaacaacatgatcttcctaagtatcggttaccaaagcattcattatcccctcgagaagccgatcgcttagttcgtgatgaattattagatgaaggcaattcacgactgaacctggcaactttttgtcagacctatatggaacccgaagccgttgaattgatgaaggatacgctggctaagaatgccatcgacaaatctgagtacccccgcacggccgagattgaaaatcggtgtgtgaacattattgccaatctgtggcacgcacctgatgacgaacactttacgggtacctctacgattggctcctctgaagcttgtatgttaggcggtttagcaatgaaattcgcctggcgtaaacgcgctcaagcggcaggtttagatctgaatgcccatcgacctaacctcgttatttcggctggctatcaagtttgctgggaaaagttttgtgtctactgggacgttgacatgcacgtggtcccaatggatgagcaacacatggcccttgacgttaaccacgtcttagactacgtggacgaatacacaattggtatcgtcggtatcatgggcatcacttataccggtcaatatgacgacctagccgcactcgataaggtcgttactcactacaatcatcagcatcccaaattaccagtctacattcacgttgacgcagcgtcaggtggcttctataccccatttattgagccgcaactcatctgggacttccggttggctaacgtcgtttcgatcaacgcctccgggcacaagtacggtttagtttatcccggggtcggctgggtcgtttggcgtgatcgtcagtttttaccgccagaattagtcttcaaagttagttatttaggtggggagttgccgacaatggcgatcaatttctcacatagtgcagcccagctcattggacaatactataatttcattcgctttggtatgggcggttaccgcgagattcaaacaaagactcacgatgttgcccgctacctggcagccgctctggataaagttggtgagtttaagatgatcaataacggacaccaactccccctgatttgttaccaactagccccgcgcgaagatcgtgaatggaccctttatgatttatcggatcgcctattaatgaacggttggcaagtaccaacgtatcctttacctgctaatctggaacaacaagtcatccaacgaatcgtcgttcgggctgactttggcatgaatatggcccacgatttcatggatgacctgaccaaggctgtccatgacttaaaccacgcccacattgtctatcatcatgacgcggcacctaagaaatacggattcacacactgaatcatcacgttattttgataaaatagttaaacttcagaaaacaattattatcactcgtggatacaaaaaatagcaccatccagattctgacgaaccgggatgatgctatttatccatttaagggatattaattacatgtggatagcaaagcttggtgtgtagtaagctgtgctcttaattgaaacagtttcaccataagttggtgaagcgatgtattggccaccgcctaagtaaatcccaacgtggtaaggtgctgaatcagaaccccagaaaatcaagtcgccagcttgggcttggctgaatgatacgtgagtaccaatcgtagcttgagcatatgtggtccgaccgattgaacgaccaaccttagcaaaggcagcttgcgtgaatgcagaacaatccatttgttcgtaaggtgtgccaatgaaggtcttagcagcagcaattactgaactgtatgatgcagttgaactagtcgttgatgtactagttgatgctgaagcactgtaggccgttgcagtagcagtcgttgttgatgaactagtcgtgttacttgcagttgagctagcttgtgagctcgttgaagtagcagctgattgcgtactagttgcagtcgtgctagtagacgatgctactgaagttgagctttgtgatgcttgtgaagctgaactttggctagctgagctttgtgaagttgctgaactagttacagcacttgagctagcttgtgaagctactgaactcgttgaagcacttgaagtgacactgcttgcactagcagttgaagtgctacttgattgagcagctactgagctacttgatactgcttggctcgtactacttgcactagtagttgatgagctggtagtagcagcgctagtagcttgtgaactagttgaagttgcggcactagttgacttagcactgcttgcactagcagtggtcgtcttagtcgtaaccttttcaccagttttaacgccaggaatattgatggttttaccagcaataattaagttagggttgcttaagccattagcttcagcaatcttgtcaacagaaacatggtacttttgtgcgtatgcccaaacagtatcccctgctttgattgtcattgaatcggcattggcaactgcttgactagtaactaacataccagctaaagcagcagttcctaacatcacttgtttaatatttactttcactttaataatgatcactccaaaaagaatgtcacgtatgtacttcaagccaacgtctatactactcaatttgtgttacataccaataccagcaaaataacaatatgttacgaaagttacaaaaccgtaacaataattagccatcgtaacattttcgcgctgaaaccctatcataccggcatcgttttattactaaaatttgaaactatttagcaactttgacgaaaaaaagttatttttattttaaaaagccgaatttccagtgacaattcctggaaattcggttaaatttcaatttaattacgaccaaacgttcggctaatttggactatttagatattcgttggcgatgatgcgttcgcggtaatcctaatagccatcgaatatcattacccgtaaagttcaacttcaagaattcgccactttgtccctgttgatacatggtcggtaatacctggtcttgcaacttgatcacttgctgtgcgatctcttcgtcaaataaatattgccgtgtcgcggcagcaatttcaccgaccgtaaaaatctgagcagcgttagcaaatatctgctctttgctcagcgccaactgggcttgtttaaactgggcgtaggactgatccaagacttggcctgcttgagtttccaatgcggttactgtggtcatgatgcgcacctcctaaatttatccctattgtaaccgccaccgctgactttgaccacgctaaaccatgctttttaaataaaatttgctatactaaaatgacaaaggggaaattaacttgacgaatacagacaatcgttattatcaaccaaccgacatcaaagatgcacttcaaacaattcaaaaattatttaatacttataccgatgccccattaacacccgaattaatgacttaccatcaaaaattagttaatcagttagctactaatttattaccactagcacaacaacaacatgacaaattacggatcacccaaattaattcaatgatggccgttatgcaagattggctaaaattaaggctgaatggtcaagtcttcggcggcaaaatgcaacacttcaagtttgtcagcaaccaaaaagcacagtacaaacgacgagtgcataaaattcgtggcaatcaaaatcatcgtgctagtcgccattgatgaccaaactagacttgcacgactagcattttgcggtatactaaaagtgtattgggcccttagctcagttgggagagcgcctgcttcgcatgcaggaggtcgtcggttcaaatccggtagggtccattttaatagacgtcaaaaacaaggtgtgttgcaatcaactttcgattgcaacacaccttattttttggatcatcatttatttatatttatcaaagtaacggtctgttattttaacgaatgtactaaattattttcgtttctggttacaagacgctaaaagtatttgattttacatgatatcgctttttttattttaccttcaactatgctccagctcgcaaccacgcattcgtttccttgtacaatcgctcaacttcttctggtcgatccgtccctaataaatcctgactaatttgaccaccgacagcttgtcggacataggctaggaattgatacgaggaccgtaaaccgttaaaatcttgaggtatcacgtgtaaatcctgtcccacaatgactggtcgtaaattatcactttcgttaattgaggtcaatcgactaatcttccacttagtatcacggcgttcgacgcggtaaatcagtcgccgatatgattctaattccgctaaagtaccattgaccatcatgcgcatatgcgtcgtggttggtagttccacgtatgccttatcgccattcagatgaacgacaggcgtactgacgctccccacaataacaaagcgcggatcaacttccttcgattctgcgccaataaatgtacttagtggtccttgttgccaactagttgccacagtcgcgtcggcgtaatagcaatctcggatttcagggttatgccgggcacgaaataagcgctcacgggccactagttcactaattagtgccatatcagttccgttactcattgacgatttcctccaatcattttagcaatcaccggccgacatttcgcgacgatcaatgacagcgctattcaaaaaccaatgacgatgccagtcgccacttaatgccgtaaatggcaccggcgtcttcccgcctgcttccaccttttcaatcaaataattacgtaagatccacggatcgttcaaagattgttgtgttaagtcaaataagtgatcgagcttagttgaactaatccctaaatcatcagctacctgggctttcgtaagaccagtcaacgcaaagttagcttgtaattcatcccgggttgcctgcatttgttgtgcgtttaatgacattatttcgttcctcctataatttaaataacgtggttgccgtgccaaacgcgatttgagctcgttgttcatcggtcaagtcggcgatatccaggaaacttccactcgtctccggctgcttatacgggtaatcgatcgaatacatcaggtgatccgcccccatctccgctaacataaattgcaactgaggcgcactcaaaataccacttggcgtcacgtacacattatgccgataataagtactaaacggatactgtaagtctgtatatgttgttaactcatcatccaaacgttccaaaaatagtgggactagttcgccccagtgtcctgaaatgagcttcaagccaggcaacttatcaaaaataccactagcaatcatccgtatcacttgaatcccaacatccatatgccaaccataaccggcagatgataagatccccgtgacaacgtcagaccattggttactttcaaaataatgactcgttactgcttgcggaataaatgaggggtgaaaatacacagggacatcaagcgccgcagctgcttcaaagattggtaagaagaatggctcatcaaaaaatttattctgataatttcctttcagcaacacaccccgtaatcccagcgtcgtcaccgctcggtttaattcagcgaccgcagcttgcggatcaccaactggtagaacggctaacccagcataacgatcaggatgagctaccactgctttcgctaattcatcattagctaattgtgagagtggaactgcttgttccggcgataagttctgtggtgatgaattaccataagataacacctgcatatcaatgccatattgagccataaatgccagacgttcatgctgggtgtcttgcataattgcaggactcggtaaattgtcccgcatgtactggcgtagcgctggactaactgctggtaacacagcgttaccaacagcttgacgcattgcggcagtcacagctgccgattcaaaatgctcttcaacggtaattaatttcattagtccacaatctccttaattggtcagttatatctaactgtgacagctattatagacgctttcatatgctaaaaaagggacgttttgagacatatcgtaatctggtgtatcattaacatatgacaaaattaattatgaacaatcaattgcatattgatcagcgaactcatcaaactcatcgtaaattgattactgccctgcaagcgaattttaagtctcaaaagtccttcaacgagttgactgtcaaacaactttgtctggatgcccacgttggacgtgccaccttttatcgtcatcaccaggatattgaagatatcattgtgattgaatacttaattgccttacaacagttaggacacgcgttgaatgacttaacgaccacatcttacgcgaccattgctggtgcgatcgtcacgacgattcgtgcacatctgggcctccccttactcgtgtcatgggcccagtgtcgcgagcgggtcatcccattagaggttggctttgcccaacagctactaactagcttagccatccatcctaagcaacggcattttatggcaacctatctcggcaactgtcttcatcagttagcttggcaacttgcaaccacacagacaacactcagcaaaattgagacttaccggctatttattcaattaattcctaatgtcttacaagcaccaacgattccaaccgactagtccgtttagtgattaggatacacaccacgttagtttggccgcctacccctgatgctagcgaatgtcgtcattattcacacccgccgtttgcctttatttgacgctacccttaccaccatgtacgctaacaatatcaaacaatttatggaggaaatatgtcatgccaatcaatccaaatcgcgcccaagatgtctggaaggatgtcggtgaacacgttcaatttaccgttcttcaattaaatcggcaggatcagcaacacgaccgtgaagtctttcaagaatttgcagatcggtcacaagccatcattcgctcattacgcatccgggacgccaaacctgaaactggcacccaattaaaagttagcatcggcatcagtagtgccgcttgggattacctgtttcctggcgcacccaaacctaaagaattagaaacctacaccaccttaagtgggcccaaatacaccatgccagcaacacccggcgacctcttcttccacattcgcgcaagcaacgaagcggtcgtctacgaatgccaaacgcagttccagcgggtcttagcgccaattacgaccgtcctcgatgagacgaaaggctttcgttacttcgagggccgggccatcattggctttatcgacggtacggaagcgccggccgtagaagatgccgctgattatgccttagttggtgacgaagacccccagttcatcaacggttcttacgcctttgcacagaaatggcaacatgatatgcccgtgtgggaacatatgcacaccgaggatcaggaaaaagccgtgggccgcgaaaaattcagcgacttcgagttagaagacgaagacaagtttaagaatgctcacaacgttgcttcaaaattggaaattgatggtgtcgaacaaaaaatcgttcggatgaatgtcccgtactccaatccagcagctggtaacacagggacgtacttcattggttatgcccgtcactggacggttaccaaaggcatgctgcaaaacatggtcgaccaaagtgactttttactaactttctcaactttactatccggacaagcgttcttcatcccatcacgtgacctgttcgctcaaattgcagataatgatttttaagctattactagcgtactcgttttgacgttaaggcttcgactaggaacacgctgttaaaaaaggcagtcttgattggtacttaatacataccgatcgagactgcctttatgttgttttaactttagtttaacggtttattcacgaacaatattgattatcattccttttcacggtaactggcaaccaacatctgctatagtagtaagtaaagcaactatcaggaggtatcatttatggcaaatcgttatttacataatgtccaaggtttgttcgacaccatcgcgccgaactatgatcggatgaataacatcatcagtctcggaacgcatcgtcattggcgcaagcaaacgatggcccagatccatctagcgtctaacgcccatattctcgacctctgttgtggtacgggtgattggacgatcgcgctggctaaagaattacaggcacccggtgaagtcatcggattagacttttcagccccaatgttaaaactggcacaacaaaaagtgacccagcaacaggttgccgatcgggtctggttgcgccgcggcaatgcgatgcatcttccgtttaaggacaacacctttgacctcgtcacgattggcttcggactccgcaacttgcctgataaagcccaagctttaactgaaatttatcgcgtactaaaaccgggggctcgcttggtctgcttagagacgtctcaacccgatcagccattgattaaaccagtctggcagtggtatttcacaaaagtagtcccactattcgggcgcttattcgcccatcaatatcaggaatattcctatttacaggaaaccactcgtcactttgcaagctaccaacagttagcaacgatgtttcagcaagcaggctttcaaaatgttcacttccaacggttcaactttggagccgcagcggctcactttgggactaaggaggccaagtaattggacgaactgaccgctttcaatcaatgtctggcttggttgacacacaccaccgccttgcctgagcacctcgatggcctggtcctttgtggcaacagcctcccagcaacagccactgcagcggtccagttagcccaagactatcaattaccactactcattattgcgggcggcatcggccacgccactaagtatttgcggcaaaacttaaacctgccaaaatctcaagctagtgaggctgagttgatggcgacgcttgttcgaaagactggctatcaaggtagtatccgcctcgacaagacttctaccaatactggtagcaatgccacgcatgcccgcgcgttagcccccaccgattggcgccacgtcctactcgtacaagacccgttactcgcgcggcggactaccctaacgttctcagccaattggcccaatgccaactttattcgctatgcgccggcgaccttgcaattaaaccggctacaaccaatgcaatttacgccaaacacaatattagctggctggcaacccgcttactttactgaactcttactcggtgaatttcaacgcctagtggatacccccaacggttatggtccccgtggtcagggcttcatcgcccatgtggatattcccgaaaaggtgctcgctgcggcccggtatttacagtcgcaatcactacaccgccagcgttaacgtttatttttaaaatctagtagtgccaccaaaaaatcccgtttcactgcagcagaacatcgctacagtaaaacgggatttttataagatgggttgatcacgatttaaaaacatctggatactgtgtccgcaacgcttgtgctgttaattcgcccgccatccgggagccagctaaatctaaatgcaccccgtccgtggtactgagttgccaagtagccgtttcaatgagttgcaattgcataaattcggccacgaccgcgcgaataatcgctgcaaaattctgattaaacgggatcattacagcaagccggctattcgggtaaagcgtctgcacctgattaaggaagcgacgcaaaactaccgtgaacgtcgtatcatccgtgtgccgatcattagtaccaacattaatcacaactaaatccgtgggtactggttgccacgtcgttttactatccacggctgttaaaacctccggcagtaccggtacgccaccagttcctggtttactgagaccaacggcactataagcaatgcggacattccgtgcattcaacaagtcactcgcaaccgccgcatagttggcttccgcgcgataatcttcggcagggtacttacccatgacccagcaaccggccgtcagtgaatccccaatccacgtcacgctgtgtcggcctaactgaactggctgtaactcaccatctgtcgtcagggctttcactgcaaaaccttgattgccatcccacacacggtcctcatcagtattaccactcaaaactacccgtaccacgtgaggccgaccatccagtgtcaaccataggggggcattcgtcaccgcctgccgttgaaaaggcaagccatcaatctgaatcgccacccaactcggtagctcatacgccaacggcaagaatgtcaacctcacaaaactagcatcagtgacttgaaaatcgatttctgcacccaaattagtgctatacatcacgtctcgatccgcaatttgcttgaccgcccaacgcccctgaaagtatgccggcatcaagggctgattggcctgcgttatttgataatccacgtttttccctcctatacctcttgtttactcaaacttgatcatcctacccattcttccgttaacttgtcatgaaacatgattaaaacatgccatttagttggcttattgttcgtcagccggtgagcgttctattccgacctccggggctggatgacaattgctggaacgcagccgacgtcgatttgagctaacgcacaaaccgcgtcatctcaaatacgagtcttattctaagccggaagaaaggcacttccgactaagaataatttggctactgagcattgtcatccagcccctccagtcgggaagccgctcgaatggcagatgaacggccacttaacttggtacaattggtcgttgactattttgataatggaattttaaacgagactttaaggttacattaaccactttgtcgagacgttcgattattactatagtgatttcgaaatagtgagctatcaaaatgttaccttctacctgacagttgctcgacaaaattactgtttataaagaaaaatgatgagtccaataaaagttgggtacatctccgtctgccattcgaatactgtcccgactggaaggcgtttctgacaatgcccagtggtgaaatttcacttagcaagcgtcctttgcttggttagtgaaaggccagtatttgagacgtgttttttcggctcaaatctgtgcccaccacgttccggcaattggcagaaatgcctggaggtcggcgtaggacgaacgaactaagcaggtttacgctaacccgaactgtttccagtgggtctaagctggctgcttttgaatttaaaaaatggcatgttttaatcataatcactgccagcaatccagaattaatactgttattttgcaaaacttgacgcctatcaagttgccatcaagctgaactcactatactagggtcatcaaatcaaataaggagttgcaaattatgaaattccaattatttctcactaaacatacgaatcaaattacattagttacggggattctgattgtccttgggatgctcagtaaatatctcttacaatttacgctcggttaccaagtcattttagcagttgcttcaattattgccgtcattccgattgcggttcgtgcttggagcgcacttcggaacaaagttttcagtattgaactgttagttagtaccgcagtgattggggcattcattattggtgaattcaacgaatccgcaatcgttactttcctcttcttgtttggctcctatctcgaaagcaagaccttgcagaagacgcggaccgcaatcaaaggcttgactgacatgtcaccaactaccgcaactttagttactgatgatggcaccgaagaagtcgacgttgatgatgtggacgaaggtgacgttgtcctagttaaaaccgggagtcaggttcccgttgacgggattgttgttgaaggtaacggctaccttaacgaagcctcaattacgggtgaagcacgccaaatcaacaagcaactcaaggactcggtttactccggaacaatggttgaaaatggctatctgaagatcaaagcgactcaggttggcgacgacacgacttttgcaaaaattattgaattggttgaagaagctcaagataccaagtccaaagctgaaaagttcatcgaccgctttgctcaatattatacgcctgccgtcctcgttttagcagtcctagtcttcgccttctcccatgacttccgcttagcaatcactgcactagttctcggttgcccaggtgccttagttatcggcgccccagtgtcaaacgttgccggaattgggaatggcgccaagcgcggtatcctaatcaagggtggtgaagtcgtcgatacttttgccaaagtcgataccctggtcttcgataagaccggtactttaacggaaggtaacactgccgttacaaccatgcacacttacacaaacaatgcggataatcaactagctctcgccgccgctattgagggggtttccgaccatccgttaggccaagcaatcgtcagttatgccgaccagcagtcagcggggggcgctcccgtcctagatgacactgaaaccgttaagggccaaggaatctgtgcacaagtcggtaagcaagaagttgtcattggtaatcaaaaaatgttgacggctcataatatcaaactaaatcctacccaactcaaagatctcaatgatttacaagctggtggtcaatcaaccgttatcatggcagtcgacggacaagttcaactcatcttcggtattgccgatacgattcgtccaggcgtgaaggattccctcgccgcattaaaagcccaaggaatcaagaaactcgttatgttaactggagacaatgaactcactgcccaagccgttgccaacgaattgaacctagatgaagttcacgctaacctcttgccagaagaaaaagtcgaatacgttaagaaactaaaagcagccggtaacacggtcgcctttattggagatggcatcaacgacagtccttcaatcgctaacgccgatattggaatcgcaatgggtagtgggactgatgttgccatcgacacatccgatgtcgtcttgatgcaatcaagcttccccgcattagtacacgcccacggtctcgccaagaagactgtcttgaacactcgtgaaaacatcttcatcgccattgccaccgtggccttcctactgattgggctaatcttcggttatatctacatggccagtgggatgtttgtccatgaagctagtatcttagtcgttatcttcaacgctatgcggttaatcaatttccaaaccaagttcgacaaacaccaaccaactaaaaccattcaagcagccacagcttaatcaagtctccccaacttggttacaggcctagcaaccaataacggtccgccgactagtcttcccagctagtcggcggaccgttttagcatattgcaatcaaaaatgatagaccaataataatttcataaatacgctcggttaattaattgcgattataaaccaaaaaagatcttataaatccaaattccaataacggcaccaacaattggggcaaccacgggaacccaactatattcccagtgagaactacccttgttcggtactgggaataacgcgtgtactagccgtggtcccaagtcacgggccggatttagggccggaccggttggaccgcctaacgaaataaccatggcagcaatcaaaagtccaacgccaatattggcgatatcgatattttgatgaaaaaacatcccgcgatataatcccatggcaccaaaaatcaggactgcggttcctaccatttccgtaacaaaaccgtttaactgactgttcgcatgatcactagttgcaaacgtccctaagaccgcctcattatcagtcgtttgccgataatggggccagtacagtgccaaaatcaagcattggcctgcaattgctcctagaaattgccagattaagtaaggcgcaacgtgcgcccagggaaagattccaatcacggcttgcccaatcgtaatcgcggggtttaaatggttaccagaaatcgagccaaacatcatggctgggagcatgacccccagtccatatcccgatgcaaccaggagccatcctccattggcgagtcctggatcatcgttaccagtcgtgttcttcaggaatgcgttagcgacagcaccattacctagtagtactaggatcagcgtgccaaaaaattcagcggcgtagcgtgcttcccatgaacctgtcatctgtaaatcctcctcgtaaggtaccgagcatctatgataatttgaagataccagataaaaccgtttatgtaaacgctttattttgcttaaataagcggtttctaataattcaacataattctaccagataccctgggttgtataattatgaagcgctagtataacacgctcgcgtcaacatgagatcttcaacgttaatgctcgcgatcacaactagaagattctcaggtgacgctagcttccacaacaaatcgttagtatctaattacccaatacatcagtcctttttaaatccctccacggccagaagcagaatacttgcttgcgtatacctatgggggtatattgtttagtgacaaatacttactaaaggagtcaactaaaatgattaaagaaatacatgatcaagattttgccaaagaaacagatactggtatcgccgttattgattttcgcgcagactggtgcccaccatgtcgcatgatggacccaattcttaagtccctttctgaagacccagcttacaaggatcaggtcaacttcgtttcattgaacattgaccatgaccaagctacggccagtcaattccaagttcaaggaattccaaccttcctgattaagaaagatggccaagtcgtcagtcacatggtcggagcacgtcctaagcctgattttgaagccgaactcaaaaaagcacttgcctaattacgaagggggcatcatgaatcatggcaactactgaagaatatgtcactagcaagcagatcaagacccgactgaaacgctcggctggtcagctggacggcgttttacgtatgatggacgaaaatcgtccttgcgaagatgtcttggttcaactttcagcagtgaaatcaagtatcgacaaggccatgaaactcgtcatcgcccgtaatattaataattgtgtagatgcgatgaccacggctgatgttcagaatcttgaacactcattggatctactgctaaaaaccaaataacgccaaaaaagacggtgtcgccaatctcagttggttataccgtctttttagtgccagttgacgcagttaaacatcgtatctgtcaggcaacttatcgagtcaatctttccaatcgccctttttccagtcatcatggttccaatcatcttttttccagtcatcgtcgtcatcactgtgggactgctcggcatccttgggcgctcgttttgctcgcttcaacagtaccgccgttgaaaccaccgttacgaacccagtcgcaataataaagacaaatgtccacatcacaatgtcactaatcgccatctcggggccctcccatataatttaattgtcgttagtatagcgcaggcccgttgtaatagcaaaaaagccctggatagtttgcccacacaatcgctatccagagcgtttaattcttctgcgacaacggcctaatcgtcatcctcatcttcttcatccaaaccagttcgagcatcgttaccaagataaacttgtaattcccgaatattgcgattgttactgccacgataagcaactaaccaagctgccagtgccggccgggtttctttttcagcaagcttgatagcccggtcaacgaataggttttccgtatcaaaatccttgattgttgcggccacgagttcatcagcagattgatacttgaaagccccattttcttccaacatagaatacttggttaattcagccgttgtggaagatggcttttggttttcatctaggagtaactcgcctaattcagcaaactgacggacattctgatctaacaaacgttgatatgctgtccgcaatgccaatgattgtggtcctttaacgtaccacttcacttgggtcaacttaacgtaagcaaccattaagttagataaaatgtgattcgtcattgcgcccgctgttgggacatggtgatcaatgtcactctgttttaattccgctgcgtattgttcgtcgatcgttagttcactcatcgtttattcctcctacttaaccttgacgttttcaacttcgtaaccaagtccggtaacaacttgtgccaaatcatcggcattcgtcacttcaggatcaaagttagccttgaccttgctggcattgaatagcaccttaacattctcaacgccgtcatggttagcaacggccttttcgatcttggtcatgcatgatgggcaagtcaacgttcctaattgcataataattttcataatcaattacctccgtgtcgttcatttgatggttctatcataaccggatttgattgaccagaacttgacggccgtcaagaaattcaaaaaagttttacgctacaatatagttattaaaacagtaggaaatttaaaacgtcaaaccctatctaccaagcaaaatctgttatagttagggtgaatttattcaggaggtgggccttatggcagaacatgaatgtgtgcagttagtcccaatttttagcgaactcggtagtgaacaattagacactatcgaatcgatcgttcgtcaccaccactatccagccggcagcactttatttggtgctgacgatccactggattcactgatgattgttgccaatgggcaggttaaagtctatcagctagctgccaatggtcgcgagcagttactatacctattacaaactggtgatatcgatggcgaagctgccttatttgaaaatcaacggcgaacctcattcggtgaagccttagtaccgacggatgtttgcagtattcgccgttcagactttcaagacttgatgcaaaaatatcccagtatcagcatcaacgtcttaaacgtctttggcaaacgtctcagtcaactggaacgtcaaacaaccagcacggccactgaatccgtcgaagcccgtttagcgaactatatcactgaaacagcggcagcgctcaaaaccgacacgtttaaattgccattaaagaaaaaagacctggcgacgttcctcggcaccacccctgaaagcatcagccgtaagctcgccttattcgagcgtcaaggcctaattacgcaaaagcctggcaaggtcatcgaaattaacgatgccgaccagctattattaactgaataatgactactaattaaattatccctaatcccccggatgactagcgaaatcaccgttagtcatccgggggcttttacgtcaaccatcacactgcctcataaggtgatctacaggcactaacagctcctgcatgccgataattcagaagtaatcttgccctttacattaacattcacaacccatccgctactgattcgggactattaagatgattagtatcattttttactgagtcggtaccagatgataccactgagaataatctaaggtataattaacttagtattagaaaatttattagggagtggatttaatggcaaccattaatcaagcagcagtaaaacaagatctctacgatgccgtcaacggcgagtggctcaaaaccgccgtcattccggatgaccattcttcaaccgggggctttatggacttagttgatgccattgaaaaaacgttaatgcatgactttgatgcaatggcggcgggaacagttacccccgacgatcctcagctaaccgaattcattaagttttaccgcttagctaaagatttcgaccaacgcaatgccaatggtgcggaaccaattctgccgtgtctcaagcaaattgatagtttaagcgactttgctgacttacaacaacggatgcccgattggatctacgacggcctcccattaccattcagcttggatgtcgacgctgatatgaaaaataccaaggtcaacgccttatttgcccaagcacctgggactatcttgcccgacaagacatactacgacgaaggcaaccaggccggccctaagctactagcaatttacgctaaaatgatgaccgaactgttgcaaaaaactggttacgaaaaggacgaagcacaaaaaatcgttgatgacacgctgcaattcgatcgtttgatcgttccgtggatcaaatccgctgaagagtcggctgattacagtaagatgtataatcctcgcaaattcaacgattttgttaacactagtcgttatttagacttagccgccatcacctactccgtcatcgatggtaatcccgacctcgtcatcttgccagaacccgccttcttcgatcactttaacgaagtagtcaatcctgataacttcggtctgatgaagaactggatgaaagctaaactcgttcaacggtacagtggttacctcagtgatgaaatgcgggtattagccacgacttattcacgggcattgtctggtcaaaaagaaccgcggaaccaagctaagagtgcctactatctagctaccggaacttttgatcaagtcgttggactctattacggccacaagtattttggtgaagcggccaaagcggacgttcatcagatggtcgaaaagatgattgccgtctacaaacgccggttgcaagcgaacacttggctcagcgcagatacgcgtgctaaagccgtgaccaagcttgataaactcggcattcaagtcggttaccctgataaattagaaacgatttacacgaaattcaagacgcacacgcccgaacaaggtggcaacgtattgagcaacgtcctccactttaaccgtttggcacgccaagacatgttctcaaagtggggcaaagccactgatcggacccgctgggaaatgagtgcggacaccgtcaatgcttactaccacccatttatgaacattattgtctttccagctgctatcctacaagcacctttctacagcttagaacaatcttctagcgctaactatggtggtattggtgcagttattgctcatgaaatctcgcacgcttttgacaacaatggtgccctatttgatgaattcggtaacttgcataattggtggaccgaggaagattctgcccacttcaaggaacttgccaagtccatgatcagtgaattcgatggcttagactttgctggtgcgaaagttaacgggacgttgaccgtatccgaaaacatcgccgatgcgggaggcttaagttgcgcggaagaagctgctaagggcgaagatgacgttgatttgagtgcgttcttcactaactgggccatggtttggcgtatgaaggccacgactgaatacatgcaactcttactttcaatcgacgtccacgctccagctaagctccgagcaaacgtacaacctaagaacttagatgatttctacacaaccttcgacattcaacccgacgatgccatgtatttggcaccagataagcgggtcaaaatctggtaaaaagctttaatcaatgaacactaagaccgactaacaagcggtgcgattgcttgttagtcggtcttttatctgttccatcattatgggtcttattcattcaaattacgcgttagtatattacaatagaactgtcgtctgatgccgttacatcgttattggactgtgatccagtctcaatcacgactgcaccgcaaatcacaccagcagacgcgttattagtcgacttaacgccattttcagtgagggtcatcaacaaggcaatcccagtccacttgacgcttaaatcagcatatttggacactggtaaccatcgaaaacaactagcattaactatgattaaaacgtgccattttttgagttcaaaatcagccagtttaggttcgctggaaacagttcgagttagcgtaaacttgcttagttagttcgtcctacgccgacttccaggcatttctgccaattgctggaacgcagtggacacagatttaagccgaagaccacgtcttaaatactggtcttccactaaccaagccaaggacgcttgctaagtggaatttcaccgctgagcattggccgaaacgccttccagtcgggacagtattcgaatggcggacatgtgcgtactcagtttttgatggctttgtcgttgtttcttataaacagtaattttgtcaatcaactgttaggctaaaaatgatattgtgatagctcgttattctgaatcgccgtagtaacaactgaacgttttggcaaagtgaagaaggcactctgatatttcacctaaagttccaatatcaaaatagccaacgacaaattgtaccaagttaagtggccgttcatctgccattcgagtggcttaccgaccggaggggttgggtgacaatgctcagtagccaaattattcttagtcggaagtgggttgcttccggcttagaataagactcgtatttgagatgacgcgggctgggcgttagctcaaatcgacgtcggcttacgttccagcaattgtcacccagccccggaggtcggaataggacactcaccggctgacgaacaataagccaactaaatggcacgttttaatcatgattcataacagtttaactagtacaataggaattactaaatattcatgacgcattttaaaggaggcactatgtcacaatttgaaaagtatcatcccattctaacgccacactatacgttcgattggttaacaaaggtgcgcgttatcgacgttttcaacttatatcagaccagcaatgcgacagccactatggaaacaaccgctgcacaaattaaccacaccatgcgcgagatttttcatgaccaccagcttgtttggggcgtaacggatcgagacacgaacgcgttcgtcggtcaggtcggctttgccccaatcgatacggctaagcatgaagcaactctcagtgttgacctgactgctacttatcagcaagtaactacgctcagggaaatcttagaacggttggtggcatttggtaccgttgagttaaagttgaaccgactcacattgattttaccaaagcacgatgacctaatggcacaaatactggctggccttaactttagtaccaccgaccacttaacattcaattatcaccaataaacaaataacgcgatgctaccttcatgaagcaaggtaagcatcgcgttattttaacttattattcagtgacagcttcggccgcatgggcaatcgctgcttgaccaagtaagttcaaatagttaaatggccggtcgtaaattggttggaagaacatatctacgaaccctaagtcgtcaatggtattgtgattttgaatcatcactgaaatcacattggctgattgcgaaacatcatgttcactcatgaattgtgcacctaggatttcgcgagtttcaggattgtaaaccaattgcattaaaacaggcttagtggttggcataaattctggccggtagttgtcttcaaaagtgacagcggctgccggaacattttcggcctgtgcatgttctagggtcatcccagatgaaacgatggtttggccgaacaacattaacccagaagttgattgtgtccccatgtacttccgcgttggcttgaagatgttcaaaccaactaaggttccttggcgaaccgcattcgttgctaatgggatataagcatctttcttagttggattatagtgaacagcaaccgagtcaccagcaccgtaaatgtctggatcagaagtttgcatgtagtcattggtcttgatcgagccattagcgttcatatcgaccttgcccttgagtaagccggtatttggccggaagccaacacaaagaatcgccatgtcggctgtgtagctgcccttgtcagtcttgaccgtaacttctttaccatcatcactgaagccttgcaccatttgattcaaagccatcttgataccgtgatcaacaaagtcttgttcaacccggtcagtgaattctttgtctaagtatttatttaaaatccgtggtaaaccatcaattagtgtgacttccttaccttgcttctggtaagcttcaactaattcagtaccgatataaccgccaccgatcacaatgacccgcttagctggtttggctgcttcccataaattctgagcgtgcgtccagttcttgcataagtagacattgggactatcgatgccgtcaattggtggaataacaggccatgaaccagtagtgacaactaacttgtcatagtgatcagtcttagattcaccagtctttaagtcagtaaccgtaatttcatgtttgtcagtattcacatccgtcacatcatgttgcatatgaacagttgcgcctaacttagctaactgttcaggactggaataaaataggccttgaggatcagcaacttggccgccaaggtaaagtgcgatcccacaggataggaacgagacattgtcatttctttcataaatcgtcacttcagtatctggatttgatgctaaaatctgattaacggcagcagtgccggcatgggtacaaccaattacaataactttcatttttaaatcgctccttaaatgtgtttatattcacaatcatgcttgtgcaacatgtatttggtaacaattacattgtactaaagtaaaaagaaaacgcaaccaaaaacacgtaaaaagtgtaaatacttcactaatcacacgataagcaaacgccttgattacaacgttctcagtcattcaggctgattattcattcacttaactgtggtaattaaaattattattatctttaaccattatggctaataactagaaagcaaaagcactcacaatcttgcgtgtgagtgcttttgcttctcttataccaacccgatcattacttaggtgcatctgttaacgtccacgtaatatcccccgtgtaagaacccggagtagctcccgcattgctttgatataaaatgcctgacttattcgtccagtctgccaagacatcataatcatcgttatcactagtagccgtgtgactgtcaatcaccgtacccgcagaattcagcgtggtcgtctgctcgccgtcgcggaaaatcacgtcgcccgccaaattctgaccaccggttgttttaaaattagtcgcactagcttgtagttgccaactagagcccttaccacgactatcccgtacaactagttgccaatcgtcttcccggtctgtcgtttgagccgaaccatctaaagtaatggttttaaacgtgctgcttttggcaaccgtcttaaaaccaagttcacctgcagtaacaataatctgcgctttatcaactggtgagacgttctcgtaacggtcagatgcccatagttcaatctcattatcatcaccgacgtgtaaatcctctgctttgaccttgtagtagaagtaaccttgttcgtcatcatccgacatttgaaccgttggcatttccttgccattaagcgttgggtgtagtgtcacttgaccgttagttaattgttccgaatcctcggctgcaacaatccctctgatgatcacgtcttccccattggcgacagtatacggactattacgaattttaaggtatagcggctgatcgactgtaatcatgtaatccggtgcttccgtcgttgtttcaaacaccttatttttaaatgtcgccgtcgttgcagttgtctgttcattgacaacgacattctcggccgtcccattgagcgtgatcgtcgcggtcggttgactagccgatactgctttatctagagtatagtcaactttagtatcactactcgttggcgccgtcaaagtctgctcactaccatccgcatacgttaccttggcactgtcaaacgtaatatgctgtggtagattgagttcagccgtaatgttatcccagtcaatttgaccaccttggtaagtcaattgatagtcgtactgaactttatgctgagctttgagctggccgcctgtcttgatttcacgattcttggtcttatccgtaaccttaaccgccgcctgtacgtcaactaaattcggcgcgctttcaatcacgaccatgttattaccagaattactaccagtcgcccccatgaatccccagcgaaccaggccatcactactgttgaattggctagtatctaacacttcactctgagtaaagccgctacccgtcgccgacccatctggattgatgtcattataagtgtacgtcatcgttttagtcgccgcatgccagtccatcaccaggtggtgccacttgctatctcctaatgacatattcgtcactaggttggtatgtttttgcgtaaagtagtaccgggttgaccaaattatcccggtaacgtctaaactcctgacagactgattttcatactgactagccagcccaggatacccggtcgcaatgtgttgtttcttaataccatcatcaaacgaatcacccttaccagcattactatagctagttgaagtattggtataggtatcaaactctaaggcccaactattttggatggccgttttcgcaaattcttcgccgtccttcaatttattatccgtatcaacaccccaaacaccgagtgtctcaccaataatgctggacgaactgacttgtgcggatgcggcagtaccatttggatcattttgtaagacaaaagccatcccatcgccggccttactagtactcgtggatgttcccaaatacacccacattttaaacgtagcatctttatttaaatctaggcgattggcgtcgttcgaccaaaagccacccacttgcttcttgccgttaataacctgaacggcctgcgtatttggcgagcttgcattggttacattcccaatattcgcactattactaatgccactactgaatgccgctggtagcgtaaagagtttatccaactgattcaggccagacggtgccgttgccaacgtcgcttcgtcagcagcctgaatttgggcggtcccggcccataatcccattaatgcagttaatgcaactagtatttgtttcggtcccttccacatgttgaaaactcctctcgctagttagtcctgacgacggcggtttttcaatagtagccagataattgcgcctaataggacaacaatcagtgcgcccaacgcaacaaaccaccagaaatagttcgattgtttttctgtaacagctgtatcatttaaagtctgagcttctttatcagtaatggtaaagttctttgtaaattgccacttacccttatcagccgttgccgttaaatgtaaagtgtacttgcccgccttcaattgttgcgtcccgtcaccaactgcaaagtcaaaattactattcggcgccattgacatgttttccttagtcgtcgtcaataattttttagacgaaccagctttagtcacgtagcttttgatctttaagccatgcataataacgggctggttgttttgcagattagccgtaacgtaattacgatagttacgttgcttggcttttaccgcgtgcaacttcatcacaggtttgatcccgcttggatcagattcacgtaactgcaagccaatcacgtacgcatattgattattgatggccatgccactactagattgtttcgccttggtactgagttcctggatgatattgattccacccagcgccacgcccgcaaactttttctcgggtaccgtcaatttaatagtgacttttttgcttgacttagcgggaacggtcacgacctgtgactttgaaagtgctgtcttgatgttaaacttcaaggagtcatcggccttagcctttgcttggctgtaatcgatgataccgttattatttgtaaccgccagattaggtgataccgtgtatcgatgttctttactatcactatttttaatggttaaagtgagattttgcgtttgacctggtgtgaccttcaagtcaaaataggacactttttgattaatttggttatcaggcaaatcagcctggaccgtgtaattgaggtcatccgctctagcagtcattgtcaaacctgccataacgatgctcacaacggcaattaactgccaaaatatttttttcataggctttacccttcctttattcaacggtaagtgacgagctatgtatgattgaagctgccattctttacaagtagcagcttcacatcaaaccatttaattaactaggtgcgttcgttaatgaccaagccagcgtacccgtgtagtcgccagcacgcaattggcgatcatggacttcaagttccgtgggtacctgcccgcgattcagaacgaccagccaagtacctagaccagtattaggcggggcaatcacgacattattcgctaaaccagcaactaattcaccagtattaacaacgttaggtgcagtactaacattgccagcaccgggccgtaattggactgcgcctaattttaaagacgtcgttaaggtctgctgaccactttgcaacccgcttggcgtgacctgtaacgtccatccagcagccgtggcgcggcgatcagttatttgaatcatcgcccgctcattcttggcagtcgtcttaaacggcccacccgcggtcgtaattgcattgaatttcaaattactgacgaaatcaatggttaactttccccgtgagcccgtaccagcgacattgtcttcatcgaccgggtcacccgggtatggtttactgggatcatcagggtcgaccggagaaactgcattgtcttcatccgagggggtcatttctacctgcacctgtgactgtgtcgttgcagcttgcgttgcgataaaccagccccagttactaatgatgagacaacctatcacagtcattaataaccgacctgttaccaacaatccctttttcatcggtcacacctcagttctcctctggcgcattaactggttagctaggggcgttacctaatgtccatgtcaaggttgaagtgtaagcgccagccgcgttaccagcagggatcaacaggctaacttcattggttgcatacttactcgtaaacttaccgatcccttcattagcttctgcgtccatgataatttgattttggtcagtgatatccaccttataagcttttgctttagagatgttattagcatcatccgcagttgcattaacttgtgcaaaagttaacgcggcgccccgtaattcacgagtatcatctgcattcatgaacttcgaacctttaacttgtactaaccatccgtccgtattcccagggttggtcactttcaagtcgccagtaacgttcttagcatcataggttttactgtcattagtgattttttcggtcccaaagctaacaccaggtgcttgatccaaggtaatatctttattagtgtcatcctggattaattcaacttcagctttggtcgttgtctccgtatctgcagcttggccaacaagtggtaatcctgccattagtgtcatgcctgcaacgagagttccgagatattttttcattttggttgctcctttattgtttgacggttgcgccaccagattagaattaataatattaataaactaagtccacatacgccgataccgaacagaatccattgctgggtcccattcatttgcggtaatacaccttgtagcgggctcgcaattttatcggccgccgcattgccacctgaattagaagtgatcgttaagtggtaagtgcctgattgcgtatcagctactagtggtaacttgactagctgactaatacctaagtcttgaaagctgcccatccaattaatatgaccacatcctttccagatattgacttaagcttagtatcattattaacgcttagtaccaatagtgaatcgttgtgagtaaccctatcagcaacgaaaatatatcatggttttggaatcgctgtcaattgatgacgccccttaactattgattaaaattcctattttaacggacttctgagccatttttaatattatagtgattacaaatattttaatataaactactgtaatcagtttaacggcaagctttcctactgctttcatttatccgattaggtccaactagttggcgtgttcaactaaacaagccgtcaacattatattatcgttagactttgatgaggccacacataagttaaaaattttgataattataaatattgaaatcctatatatatttagaatatcgttgtaacagcaagctattacataaattatcttcaatttataaaattatgtaatcgatttaatgtggaaatcttttatcaattttaaagtgccacacaatcaactaattaaaatcggctttaaaaacagtaaaagccccctaatcaaataatttcaaacgttaatattcatttaccaaacaatgaagtgtgctgtggtatacttaaaacacttatttttaaccagaaaggcggttcgaatcatgcccgctaaaaagacatttcaagacgatcaagttatcgaaaaaatcatgcacttattttggcagcaaggctattatcatacttccatggacgaaatcgtaataactagtggcgtcaagaagcaaagtttatataacgctatcggggacaagcacacactttacctgcgtgcactccagcgctatcaccaacaaactttaatgcgttgtacccaagcaatgcaacgcttagagcaggatggtgccgcccccttagctatcctgagtatgctctttagccacgatttaacgacatccgaacaaccagccggtgacctaatggctaacgccgtcgctgaatttggtactactgatactgatgttcagcaagccgtcagctggttttatgacgactacctgaccctcatggctgcggtcatcctcaaaggtcaagctaacgagcaaattatcaataatcagtccagtatgacattagctcaggcactgctagaagcccgcattggccttcaaacgcgactccgtcaaggcagtcagccagatattcaagcgcagcaacaagcctggatggcttttctagcacgtcgttgaacctaaagcagttaatcagcgcataaaataagcaagcttctcccgaacattttgggaaaagcttgctttattttttcatctatatataagtcacagtcatacttttgggtcataactagcgattgacttataaatatttttgcactaaccagtgctgtgctgagctcgtcaattgactaccataatgttgtcgcaaccgttgcacacccgcgtaatggtcaaattcaaattgacttgtcagcgtctcactagctagcaacgccttagcaaactgtaaatcgtcaatcgtaatctgttgtcggtaagccaaatcttcatcggctatgattcgttgccactgatccgttaagatggcactggcccgctgataacgacggtcatgggttaacaaggattgcatatcatctggattaagtggtgtccccatattattcatcctccaagttcaaattaactacatgaccgattgctggctcaatcgacaatcgatcttcagcccgcgctaacaaccaaatcacatttgtaaaacggtgtgactcaacgtgccgttcaccacggccatccgttaagatcagcgccaaggtcgtcgcattcgtcttatgatgtgttagtaaatcatcaaaaatactttgataaacggttccaccaccaccacggcgcgtaaagcgaatctgctgtggcaaactcacctgatacgtttgaccaggctgtacgattgcatcaaacggcttaacggtgatggttgctgcaaataatcgggttaaagtagccacctgtgccagtaatcgttgcagcatcagatcactgatagaacctgaattatcaacataaacttgcaagtccaagcgcgtatcgccaatttgaccgggtatttccatccgcgcgggttgccgtcgattaaagcgcgcgtgcgaggccttagtaccgctcggaatctgacccaggccccgaactagtaattgtcgccaatcaagctgggccggctgcgtcattacagtgagctgagctcgaacattgccggccactaaccctcggccagcttcatttgtttgctgccaagcatctttcgccaactgttttaaacgggcagttgccaaattgggattcgttaactgttcagaggctgaccagccacttggatcatcgatcaactgttgcgacttttggtcgccagacccttttgctggctgccgctggtccttatttcgcgaagtggcggtgggcgcgccattcggctgaagttgcgaccgcgactgctgctgtaataatttcaaataacagccagaatctgctcgtcgcggtagctgggcatcgactaacggctggacagtcgttaaactgaccgcatctttaggcagaccgtcgacatactggttaacggccaggtcggtcgccaacgtcactaactccggctgctgcttgacctgatcacgataccgaacggggtgttgccagacaatgtgtagtgccacgtgttttaaccccgcttgtaagtaagaaaactgtgaaaaagctcgagcaattactgttggcgcatattgtaagaccaactgattattctgccaagctaagataaacggcgtcgttaacgtcgtatttaactgtctgggaagtcgggtcagcaactcgccataaaattgatcggtggctagtaactcaataatggcccgatcaatcatggtcgcacctgcctggatcgtgtctgctgttggcgtcactaacatcgcttgttgccaacgtgtgtactcattggcattgttaatcatgatgactcactgctttcttactgatttgaccaactggcgacctgttgtaaatactgatacaaagcggtcacatacggactttgcttggcaacatttgctgtatataattgctttaataagtcgcgttcatggccgatttgttgaaccaatgcaaactgaccatcttgactgagtgtttgtaggagttgcatgaaccgaccagcgtgctgatcgtccgtcaacggatacgtggttgttagagccaaacagcttgccaaaaccgttcgcttttgaatttcattcatcgccgtaaactgcttaagaatcggtgccggcaccacggcccccactggttgactgtcataaatcatcgctggtgtcagatgaatggcttgttgttccaagaattgctcgaatacaagccctagctcagtacccacatctccttgaaagatatccagtgccacagccgtttgttgatgcacaggaagtttttcaatctcatataaattagccgaaacacgcgcccacgcacgtggcgtcgctgttaaatcagcctggacatcagcctgattaagccgcgttacatcttcactaataaactgctggacgagtggatgaatgtttggtcggttcatgcgctcatccacttgtttggcccaagcaagccagtctgccgcatctgctcgcataactagacgcacggtacgatctttgatggccgcatcgccagcagtaacaccatacgtactactttcgaatccagtcatactagcatctggattttcagcaatgatcaattgcacctgttctggcaatttcaatgtgttaatcgtccgttgcaagaccagattcatcaattcactttgaacagcctgcgtcccacgattaaattcgtctaaaaaccataaaattggctgctgaggatgctgctcagcatactgaataatttcaattaacgtgtgtgcatagccgaattgtacgtcagccaactggccatagcgcttcgtttgaataaatgagtcgctcgttagtggtgggactgggatcgctaaatctcccttttcggacaggctcacaacggtcgtgtataattgcgcccccatccgcttagcaacctcggctaccaaggccgactttccaatcccggcttcaccgacaatgttcggtacgttccccgcttttaaaacgaccggaactgctgttaatagagcttgatatgataacgccattaattaaaccttcctttactgttccacgtgaaacaaatttaattcgttttcaaaaacatcagcttacttgtcctaaccattataaaacagaagccaccattatcgacaattagcgttcacagtcacgttaggtcacacaccaatcatactgactactatcaatagtgactatgcaaaaataaaatttttatttattatagttttaacaatccacaactgccataaaacgtttttataccaacgttttaccagtatcttatccattaatataattataaaaatcttatcagaaatattcacaaatcaaacaaattccgtcgttttcacgagcaggtattgtaaaataggttaagttagcaattattcaaaaagggagtgtgcaactatgcgcaagtatctcgccgaatttctcggcacatttatgttagttttcttagggactgcaaccgttgtgattgctaagggtgacgtcctcgctattgggttagccttcgggttagcgattaccgtttcggcctatgcctttggtggtatttctggtggtcactttaaccccgccgttacgactgcgatgttaatcaaccgtcgaatcgatgccgccgatgccattggctatatcatcgcccaaatcattggggccatcgttgcttccgcagcagttaagtcgtttgtcagtgcattaggcttatccgcaacatcgcttggtcaaaccgattttccaaaaatcggcagtggtatggccttctttgtagaagcactagtcacattcttattcttaatggttattctgaacgttactagtaatgaccatggtaacgcagactttgctggtttgaccattggggtgaccttagcattcttgattattgtcgctctcaacttaacgggcggttctttgaaccctgcccgttcaatcggccccgctatttttgctggtggtagcgccttatcacatctatgggtctacatcttagcaccagaagtcggcgccatcttggccgcattctgtgctcgggttatgggatcagaagactagttagcaattgacagtcgtaccattaaccacgatcaatttgatactgaaacatgattaataaaacagcggtaccgtgatgattttatggcttggaatcatcacggtaccgctgtttttcgtatgcttatattttaggcagtctcaattagacgaatctacgttgccaacttctcatgacgcatggccctatagcctaaccctacgccaagttttacttgcgtcgccaatgcgtgtaccaggaatggagcgttccaatcaataggccaataatgacgacaactgctgaaacatagccaaaaacaccaatgtttgtaatccaactattatcaggatggctttgaactagtagtgatgatccaacaatcagcgctgccagaataacggatagtacaatcttattgaccatcgaatcaatccgatcaataaacatcttgcggtgtgcaaagaccaagttgacccgcgtctgaccattctcaaacgtatctagagctgataataagcgtgacggaatcttcggggcatcacgcaggctttgaaggctagccaacatgccatcttccagttcattgcgccaattaaaattctcgcggatgtacttgcgcgcaaatggccgcgccacgtccatcattgataaggttgggtcgagcgtctccacaataccttcgatcgttccaaacgccttacctaacatggtaaccgctggattcatttgaatattattactgcgacaaaccttgaccatttcaaacaacaagccttgaaaatcaatgtcgcccagtcccgaattataatactgacttaaaaatggtgctaactcactaaagaacgcttcttcatcaaccacgccagttcggtttgaaatcgctaagattgctttgccgacttgatgggtatcttcggttgtcactgccacgacaacattagcaattcctgccatcaaagctggactgatctcacccatcatgccaaaatccagataaactaaccggtatggtggtaactgccgtttgccaattttcccgccatgcttgggaaccgtatcgtgatacccaatatcatctggttgcaattcccgcaataagatattccctggatgaggatcagcgtgaaaaaagccatcttcaaaaacctgcttcaagaaattttgcaccaagacatgggccaaatagcggcgttcgtcatcatactggtgatttccgtcttcatcggccgcaagcatttgcgccataaaatgctgaatcgtcgttcccggcatatactggttaacaagcactttttgcgtactatacttcgcataaacccggggtacccgaataatatcgtccgcattattcaatcggtaaaaccgtaatccattttttacctcaatactggtatccaattcattgaatagtgaccgtttgatctcaccaaccatttcgcgcaaatcaacaactgaagattccggaatatatcgcaataggggtaacgcccgctcaaataatgaaatatctagggccacctcggcgtcaatacccggatgctgcaccttcaccacgaccttctgcccattgagcagcgtcgcatggtgcgtctggcccattgatgctgatgcaaacggtcgctcgtcaaactgggcaaacatttcattgattggctttcctgtctgctgctcgatcgtttgcttgaccacactaaaatcatcggcccggacattattttgcaattttttgaattcgttagcaaattctggcttaacgacatctgtacgtgaagaaagaatctggccaattttaataaacgtcggtccaagttcttcaaacgccgcgcgcacttgatcaggattcttctgacgtgcaagattgctcaaaacgttatagcgccgcaagacactgacaatcgtccgaaaacgggtatggcggttctgattcacttgccattggggctcttcctcattgttgttggtcatcagcggaccctcctcacaaatttccttattacagctattatccatctttatttaagaatccgcactagctaactaactttttttgaaaaaagattgacaaatactaatcgcggttgtaaattagaatcacattaaaaatcgattaacaaacacgccgatgaacaaagtaaaccttctggaaatgcctagagagtgtcagtttggtgcaatgacatcatgaccagatcgttgaaaatcagttctgagtggcagtgacgagcttgatgttagttgctgttggttgctcccattattgagccgaagtatcgcaagtggccggccacttgccgtactttttaaggtgattcgtcgtaaggcagtcacaaagctaaggtggtaacacgtgttcaaacgtcctggtttctgagtctaactcagatatcaggacgttttttagttaatcgcaacttttatttaatgattattgtctcaatcaaataagggagtgctgttgatatgttaaatcgagttcaaaagcgaaacttaaccaaacgtgattacgtcaccttaagttcaatgattttcgccttattcttcggggctggcaacctcatttttccacttcacttgggtcagctagcgggcggtcactgggggattgctgcggccggctttctcatcacggcggttttattgcccttactatctgttttagccgtctgtgtcactaaatccaagggcgtttatgacattggtaaaccactaggcgcaacctttgccgttgtcttcatggttctcatacactttacaattggccccttctttggaacaccacggacggccaccgtatcattcaccgttggtctggcaccgtttttcccagcaaagtatcaatcactcgcattactgctgttttccgccgcatttttcggactcgcctactacttgtccgttgaacagagcaaaattatggctcgggtcggcaaattattaaatccattatttttgctattattagtcgccatcttcgccgtagctttcagcagtccgctagctcatgccggtagcaccagtgcaactgctgcctatcagaccgcaggctttaccaatggtttcttgcaaggctacaacacgatggacgccttagctgggttggcgttaggtgtcactatcgtcactgccgttaatttcatgggccaaaccgacccgaacaaagccgcgtgggtgaccgcccgagctggcttcttctcaatggcctttgaaggcttgatttacgtgctcttaatcttgttaggcgcgcaatcgttaggtcaattcaaattatccgataacggcggggtcgcctttgaccaaatcgttaaccactacatgggtaatgccggacaagccattttagccgtgttgatcattaccacttgtttgaccaccgctatcgggctcgtcgccgccttcgctcaggacttccataagcacttcggtttcttgagttacaaagcctggttaagaatcacgtgcctcgcctcatttttaactgctaatgtgggattaaatcagatcattgcctggtccacccccgtcctgatgttcctttacccgttagccatggcactaatcttcttatcgatcctttcgccactcttccacaagtcaagtgtcgtctatgtttgggtcgtcgtcttcaccgtcgtccccgccgtctttgatatggttgccgctttccccgccgtcgttagccaaagtactttcggccaagcaatggcgcatgtccaaagcttcttaccacttgccagcagcggaatggattggttagtccctgcgctagttggtgccgtctttggcacggcccactacttgttgttacagcgggcaaaggccagcactggcatggaagtaccgatgaaacgctaaccggtaccgtacttgttaaacaatttaacgaatgccaaataagcactgcccactattttgtgagcagtgcttatttgatacctcaagtctaacacgaacaattatcgcaatgagtcggcgttgtcatgaccgacaactccaatctatttgaatgttactttcattgctgattgaccatgctgtacttctgttgaccaatcttcagtgtgtgctgtaacgcgaccaggttgcgtaaagaaagtaacaaccacatcgtcataaccactctgtttgatcagatcacgatcaaaggtcatcagtaaatcaccagcgtgtacgacttgcccatcttgataataagtcgtaaagccagcaccacggaggttaaccgtcccgattcccacgtgaataattgtttcaagaccgtcagctgacacgattcctaacgtatgtttagttgagaacgtaaaccgaatcgtcccatcgaatggcgcatagaggcgaccatcacttggcctgatggcgaaaccaactcccggtaagccttgtggctgtgcggcacttttgacatccgctaatgcgagcggttgaccgcttactggtgctaagatttcagtggtcagaatgtcagatgcaggcgttaccgcaacatccgctgcttcccctgttgccaatttagcctgtaactcttcaacaatttcggcatgtttcttttcggtaatggttactttgaatgtaaagactaacaatgacaagattgcacatgctaacggcaagtaaaacgctaagagttcaaacgtatgaatattacttgcagtcatatcggcggccgttgcactaccagtcataccagcaactaaagcaatggcaccgacgataccgttggaaaaggcaccagtaattttgtcgagcatcggccgaacggcaagcaccaccgcttcattacgattgccattcttcaattgaccgtattcaatggcatcggtcattgataggaccgtgactaattgggcaaagttaatattgaaaaggactaatccgatgatcaataaggtcaaattcgtctgcgcaacaataaagataatataggctaaaatcattgagcattgaccgagtgcaaagagcactttccgtggaataaaccggttcaagattggatatagtggtgacgtcacaaaaccgatcacagttgcgaccgccccagcaatccaaaattcaccaggtttaccaatcacgaatttaaaaagatagaatagaaccccgttggttgtcacgtatgctaatgaatagaataagtaacccagactgacccacataatttggtcattcttgataatgcccataaagacacctttgatcgtcgtcttttgtttggctgcttcccgaatcgcattgtgcttctcactggttccaaaggcgacaaatagtgcggaaatgactgccacaataccgacaataacggcaaacgctagccagccttgtggaccttgggtatgcttaccagttgcgataaaggtaaagtacgtggtaattggtacaacgaccattgtcaggccgttccaaccgatcgtcccagtaaaactgccaagagccgtgaaaattccccgggcatgactatcttcactaatcgctggaaccatgccccaatacgagacatctgttaacgaatagaagacatccaagataataaataaaatcacaaaaacaattgcaaataaaatccagtttacctttgctaatccaaagattcctgagaaaataacgactaataagaccgaactgataatactcccaatgacttgccaaggcttaaacttaccccaacgtgtttccgtattatcaacaatattgcctaagattggatcgacaacgacttccgctaaacgaatcaccaccaccagtcctgtgattaaaccaatcaaccgattggcgatagctggtgcaacgccgctaaacatcccactagtgacaaagacaataaaataggtactcaacgcaccatagaatgccgagtgtcctaagttacctaatccaaaggcaacaccttcattaatttgatgccatgataactttttcttggttactggttgttgttcaacattttgtgccattaatttcaccccacttaattatttattcatcatatagacttgaacaccatagctggccaagtcttgcttgccactgaccacttgattctcaaaaatctgccgtaacggcacttcaagtgtcaccgtcgttggtcgatgactaaaattgatcacgaagtaatagcgcgtcgtcgcattctctctaacttgaatacttaccttggcattcgctttgatcactggcaaggccggtttaagtgccaaacttgtggcaagccgttcatagaaagcatccaagaagtcagtatcggtccgcgcagccaaataatacgccgctccctggcccaattgattgaccgttacagccggtgttccagcataaaagtctttttgatacgtgccgaggacttgtgccgttgtcgtctcaactacatcacaataatcattcacttgatacgcttggtgataagcagtcagtgcattatgttgttgcggatataatgtgtcagtttcctgaactttaattccgtaagttgcttctaagtcagctaacccatcaccttgataggctaagaagtcatgatcaacgacgcccgtaatataggtgccgatcagatggccgccctgttgcacatatgctttaagcttagtcgcaaactgggcgctcatcatgaagtgcatcggatcaatcaccaaatcataggctgtcaaatcatcagtagtcgcaataatttcaactggaatatcatgtttccagaaatactggtaatgttcttgaatcgtgcgccaatactttttagtttcgttagcgtagttgcgggcatcatctaagccccacatgttgtcataatcaaagacaatagcgactttagctgcagttctggtcgttccatgcgcggcctgtaagctttgtaagtcctgaccaactttttgaacgtccttaaatgcccgcgtatttgagccacaatggttggcaatgacggcgccatgaaacatttcagaagctcctaatgattgatgtagttggaaatacaaaactgagtcggcaccatgggcaacctgttgcaagctccccatttcgtgcatgcctggtcgtttggcacgattatatgggtgccaattaacctgtgacggtgtactttccataatcaagtagttatcatgcttgaggctccgcatcacgtcattcatcaaagcagttttcatggccaagtgggccgtactttcgtaaccattactccaattaggatatgaatcccaactcacaatatcgacatgcttcgcaaacttctgataatctaaatcataaaagacgtgtgattctgatgggttgccacccataaaattggctgtcacagggatattaggtgtcagcgctcgtaacggtttaatttcattatcaaaaaagtcaatcgtccggtctgttacaaaacgatgccaatccaggttaagtcccattacattcgtatcacccagcggcgacggtgcctgaacctgatcccaacttgtataatcgtgactccaaaaagcaccacagtaagcatggttcaaattggctaacgtttgatactttttttgaacccaatgacgaaaggcttgctggcacaaatcacagtaacaagcaccgccatattcattagagatatgccatagcagcaagcttggtcgttgaccgtaacgttccgccaacttctggttaatcatttgaaccttttctcggtaaactggcgatgtgtaacagtgattatgtcgctcgccgaattgatttcgctgtccgtgttcattgacacgtaacacttctggatatttctcagctaaccagcgtggacgagccccgcttggcgtcgacaaaatgatcttagtcccttgggcttcggcacgatcgaaaatttgatctaaccagctaaaatcatactgcccctcagcaggctctaacttgtcccaagcaaagattcccaatgtcaccgtatttaacttagcagccttaaacgctttaaaatcctgcttaatcacctcgggttggtcaagccactggtctggattataatcaccaccatgcaaaaattctgttgtctttaatggattggacattcaaacgcaccctcacttctatcaacttaattacgctttaacagctcttatgataagcgctttcatttacgaatgtaacccgttttactaaaataattactaaatatcagtaaacactatttacgttttgtttatattcattactgcttttattagcgctaatgaaagcgtattattataagtgaagctttttaactctggtaatcatctgtttagcaacttgtttgtcgaaaggagtcttccactgtgccgactattcgtgaaattgccgctaaagcgggctattcaccggcaaccgtctcacggctgttgaataatgatccgtcattttcaatctcggatcacgctcgcaaaaaaatactacaaactgctcaaaacttgaattacgaacaaccaaacaccactcacggccttgcctatcagatagctacaatcttcgctgtccaaccaaaacaagaacttgaagatatttatttcagtaatttgcgtcagagtctcgttgaacacggaaaacaggctaatttaaagctcaccttttatccggatatcgaccacattccccacgacatcgacggtgtgatggcagttggcgaattcgattctgatgcgctccataaattgcgccagctaacaccccacagaatcttcgttgattccaatccagacccgcatcacttcaattctgtacagcctaacctccaagcaattaccgaacaagccatcgatcaattgatagccgcaggtgatacgcccattggtctcattaacggcggctactggaataaagatcaacaagtcacccatcaacaagatccgcgccaaaaatactttgaaagtcggctacgcgagttacaactatttgattcgcggtttctattcattggtggtgaattctccgttgcaagtggctatcgcttgggacaacaagtcgtgcaatcgttgagtaaacaagcattgcccaaagggttcttagtcggttcagatccgttggccgtgggtgtcttacaggctttcaatgaaaacaaaatcacagtccccactgataccgcaattattagtattaacgatatcgacattgcgcgctacgtttcaccaccattgacgactttccacattgacacagacgacttagccgcacaggctatcacaacattgaaagatacgattatttttgaccgttcacagaagcgcatggtattagttgatgctaaattaatttatcggaaaagttttgtgaagccgacgaataaatcatagtttgacacaaatcaaagacacttttggtatgcacttgcttcaacaagcgcataccaaaagtgtcttctaaattaacccattaaaataatgacggctacactgggaccaccgcagttctattaggttccaaagattgtctttgcccatccacaatcaatgtcccaccagctcggctagcagtgactgatagttggtgttgatcttttacgacagtcacggtaccgcctttaatgggtaacacggtgtgtaaatgatgaaattctgataactcaggcttgatctcaaaagtctggtatcctggagccgtgggccgtaatcctacaaaatgacgacctaataaatatatcggactggctccccaggcatggcacaggctcttaccatagggatcaccatacatggcatacatatccttgccatgctgcgacgaatcgaattcttcccagaaggtcacggccccgcgatctaacatgccgccccaatagtctaataaaacttggtaaacacggtgttgttcccccagcttacataaagcatcttgttcaaaaaacttaaaatacggcgtggtaatttgagtaatcgcattattcaacaaaacattctttaaaattaattgttgtttgttctcatcaacaacgtcaaacaaaatggcaaaaatattagcatgacgagtaacgtgccgcttacccgattcataactatcaataaatgctccttgttcatcatcccaaaagtatttcattaagttcttaaacaactggtcatacttcgcttggtagcccgccacatctttgcctaagacctcaccacaagtcataattgtcttgtaatcttcaagtaataagatttgttcagccgccacggtaccctgtttatccatttctgaccaatcgacaaagatccagtcatttttccgaccataaataaaaccatgctcatttgtctgttgaataaagtattgcaccatactctctaacttagggtaaataattttgagaaattcacggtcacccgtcatctggtaatgatttagaacaccaatcacccacaacatggaatagtcgacaattgtattcatatgttgcttaatatcatcttgcccacgcaacgctaataacgtccgtttatcaatatcttcgttgaagaaagaatattgattgataaaattagcttggtacgcgtcaccagcccaaatccaccgatcacgtttgatcccatcgataaagaacaagtcactgcaaaggtttaacgtttccgtcgctacattccaaatttgattgatcaacttattatcagaggtaaaactggagggattatttttaggaatatattcgtgcatagcagttaattcaatgtcacctaactgacaatgaggcacaaagacatatcgaaacgcacgtttacgaacctttgttgtagctgtaacgtccgactgcttgtaataacacatctcaacatcccgtgcttcagtttcggactccccgtaacatagcgtaactggcccattcgttttgactgtgacagttccattcacagcgcgaccaaaatcatataaaacgccaccgtcaactgcttgttgtgctttggccactactttttctgtccgatattcaatcacattaggatcctggttacggtcagtgtagagaatatcgtgaccagcgggtaatgtggtgacaaaattgctagctagccaaccactatcagatttgataatctcaccaacaatataaatcgtcggcaatccctgaacgttaccaacaaacacttgaatatcagtcgcacccgcatcacaattaatcgcatgatttaagcgatacttagtgccattaacatcaacatagcccgttcctttggcgagtactgtaaattgtgtggattcttttaaatcatagtgccgtttaaaattaacattacggttgcaatcatcaatataccaataggcaggccaacccatcccacgttcttcacgtttaaaattttgtaacatcccttggtggatttcaaaatcaccaggataccataaccaaacagcctctttcgacatgagtattatcctccttgattttaaataaataagcccggcaatgcccggcttacatttttaattcttagtaatattaatcagtttattcagaaaccgctttcatcgttgggtcttttaaaccggtcttcttaataatagcgacaatgatcactgcacaggcaccaaatagcaccgtacatccaaccataatccataataagagttgcggcgaatatcccattaatgttggcgttactagtgagaaagcagcggtcagcacccgaactaagccataagaaaagcccgtcatcgttgcccgtgcatccactggatagaaagtctgactccaaattttataaagggcctcaccacataatactgtgctaccagagtagaaaatataaacaacggtgaaaatctgccagtcatcactaaagatccctgcagtcacaaaggaaagcaatgctacggcaatacctaaatacatcactcggtagcgatacctagtgtctgaaacctttaaatagatcaggttaactaacagacacacgatattggcaattaatgccacgattgtcgaataggcttgcgtacggccatcaacagtcactaagaaatagttaacaaatgacccccacgtattggccggcaaattccaaaatagataaaaaacagttagtagaatcattggtactaacaaaccacctgttcgcaatagctgacctaatcgatacttcttaaccgattgaccgttagatgcacagtccacatgttcatggtcaactaagtctgtttcaatctgtttaaaacgctttgaaaagacccgcacgcaccaattaataattgccactaatccaatccaaccaaataaggctgccgggcttcccataccactgttagcagttataaaaccaataaactgtgacaacaaaatgcccatcgtccaaaaaatctgagttgaagaaattgcccgaccataaactttactagacatccgttccgaaataaccgccaatgacgttggtaaatcagcaccagaggccaaaccagcaatcacaacaccaataatcaatatcgtcgtattttgtgcaatcgcaataacaaacgaaccaatcgcgacaaaaaagatatcagcattaaacaccgcgacccggccaaatttatccgacagccagccgcctacaaatgaaccaatcgcaaccgcgaccgtcagcatagtacttagtagtccgaccatccagctattcagtgctaaatattttgtccagataggtagcgctactcccagactaacgagcaacgctgcatccatataggaagctagaccagcaacaattattaagagtacgtttgctttactcagctttactttttcgtcaaccatcgcagacactcctcctaaacgaggtacttattaatcaagtacaccggtgtacagctccaagcatgacaataactatttaaaatgggactcccatacggcgaataatcaggttgattaggatcaaatgcttcccaataagtatccgcacctagcgtaatcattttgccccagtaatctttcattaattggacggcctcttgctttaagcctgcttcaaataatgcttccgtaatatggtgatacatatacggcgttgcaataccagtaattggaaacagtttcgtgacggtcgtttgcataagcgccgtggtttgctcaggatccaaaacatgtgctagtgtcatccacacttggcttgccacattaacttcacgctgatcccctgagacaaataaccccgattgcgaatcaaacaattgagttttagcgtactggtttaatttacgcagtatcgctgtataggtctctaagcttgtatcattaaccagttccgcaagcgtaataaattgttttagcgtataaataataatggcctgcccagccgtttctttgtcaaaatcatttgaccagtcgatgaaaaccggattttcttcagtcaatttcaatttaccttcagaagtaacttgtgccaacgccaaatccatttgctttttagcaacacgatataaatcattcaaaactgttttatcagaactaaacgcctcataatcagccaaaattgaaataaagaatagactgtaatcaaacaagaaggtgtcatctggaactgccgttggtttagtaaaaacattggcaggaatccggccagccgttgtaggcatcgcaccgaacaaatacagacaccgcttgaccagatctgtatctttgaacgttgcataattggccaatgcttgtagccgaagatcaccaatccataatcgccgatcgcgctttggtccatcttcaaagacatcctgcatacaatcagctaatgttttcaagccaacctcataaatccgttgtaattgtgcatcggctaatttcggttgatgcactgtcgcagtgtctaccgcacttgtcgccgtgaccactggattgctaaaaacagctcgccattttggtgacgtatcaacaactgtgatctcagcataacgaaaactatagcgtcgtggtaacgtcagcgtggttggcagcacatctaagtgaacagtttcttcttgaatccaagatttgctcaaccaaccgtcgtaatcttcactcttgcgtgctaattctgcaggcatttcagcaaacttaatcttaaaacatagtggtgcatccattggtgaaccaacagcgttaatattaatactaaattgaccaacctgatgatcgccaaaatctatgataatttggtcgtcacgtttcaactcataacttgataatcgttcaataggtgcaatttgtttaacaccccatccttcaaggtattgcgtatcacgctcgagcgccacaatcgatgccgccttaacttgggtttctttcagtattggccgatagcttgccgacttgtctaataatgcttgattatgccgaaattgaacatcattattgatttgaaaagtaaacgccatctcttccactcgctttctaaatactttgtttaaaagttattaataccatgtttcttttccaatcgcatcattgtcagccctgctacaaagctaataaagacaatggcagcgaacccaaacatcgtgttacgaattgctgatggcacaactaacgcaggtgtaattaaggcaaataggccacaacatacccgtgaaaagccattaataaatccttgaactgatgcccgaacttcaactggaaatgcttcctgtgtccaaactttatacatcgcttcaccagcaatattattcccaatgttgtaacagccaatcgtgatgacaattggccataacgaatgactactcattgctagtccgagcattgccaaaaattgaacggtaatcccaactaagaagaacttattacgatacttacccccagcgactgatgcaaaagccatggttgccaacaacgagataaagtttaggactatcccagcaccagttgcgaaactttgactcgcatgtgcttgaaccagcgtaaacgtttgaaactgtccgaacgtattggccagtagattccagcaaacatagaagattaaaatactgaagaagaatgccataaagcgtcccttgttggcaccagcgaagaccgtcttaatcgagaccttctctgttgtctgtgaagctgcttcgcgatcaatacgccgttgttcaccttcttcatgaaatgctcggaacttagttgaaaaagtccgccatgcccaagtaatcaaggcaaaaattgctaaaatcgaaaaaacaatccgagcaccggaagcaccggccattttagaaacaataaaggcacaaacataagacatgaaaaccccaatttgccagaagatttgcgtcgacgatactaaactagccgaggtcttatcatccggtgcatcatgcgaaactacggttaaactaattggtaaatcagcacccgaagctaacccggtaatgatgacgccaatcaaaagcatgatataattattcgagaaaacacagatcaaggcgccaatcgcataaatcaggtttaaccaattaaacgatttaactagaccaaaagattttgttatctgtcctgctaataaggatccaattgcaattgcaaaagttagtgcacctgaaataataccaacttgactgttagtaagacctagtccgttctgccacactgtaatagtcgcggataagccaacgataattcctgatcctagaatggaaccaattcctgcagctactgctaatggccgatattttttcaccattgaagttgacgtctcgccgttattcatatgaagaacctccctttatttatacgaatattgtaagcgattactgtaaggggtaccatatctcaactacatgaatgatcgtgcaaaatcacaggttgtactaaacgataaatattaaagaaggttagtattaatgactagtaaatttctcaattacgaattatttgctctgacaccggttgagctaaagcaacgccaatcacatggtaacgttaactacatggacttagactatgtgaataatccgattccccagatgccccgctcagatttttttaagcacggtgatattgctgttaccaaaaataatcgcttttcctatgttccagctcacacgcatagctttattgagcttaattatatgtatgctggcacttgtactcagtatattaatggcgaaaaagtgaccctccatcagcacaacctaattttgatggataaagacattgttcagcaaattgaatcaacgggcagtaatgatattttgattaacatcttgctcaagaatgactcaacgatgaaccaacttttcgactatattgccgtttcaaccaatgaaatcactcaatttttatataatgcatcccacatcaatacgttgcacaacaactttattctgtttgacttaacacaccaagaagttgccatcaatctagttgaaagtttaattatcaagggccttacaaagagccgccaacataataaatcaatgggcctgctgctatctacattaattcttgaattatcgcaatcgattgagcaagaatacattaacttttctgacaatacggacgacaatcttttgccaatcattcagtacatcaatcagaatttcgccagcgtgacattacgtgatgtcagcgccaagttctcttataatacgaattatctgggtaacaaattaaaagaagcgacaggcaagacctttaaagaacttgttgaccgccgccgaatttctgctgcccaaaacctgatgatcaagactaactgtacactcgctgacatttgcgacatcatcggatatcaaaacacctcatcactctttcgtctgtttaaaaaatacctaaagaccaccccatccgaatataaacgaaaagttagtggcccactcaagcagtaaaattgaccgctgcgacaaacgtcatatatctcactaaactaaaacaacaagtgcactcagattagaaattcccgagtgcacttgttgttttactttaagaccattcttagtatcacgactaacaataattgatctatttggttagtacttccaggaacacctgtgccatcatcttgaattgacgcttgcatgtaagcatcctgctgtgcctgggtatagttgatgtcaaaaccatgctgccaagccaaaacctcagtaaacagccgcgtcgtgcggccattaccttcccgaaacggatgaaacatgttgatttcggtgacaacttgccctaacgcctgtgcaacttgttcccggtcatccggtaacagcgcaaaattatcgagttggcgttgaatatctatctcagcattaccaaataaagccaccgggtgaaaaaacgtcactacgccattcgcggtcttgttgaaatcaacttcgcgatagtgaccggcccagtcgtaaatttcaccgagcaaaaacccattgatcaattttagctctccaatttgacgtcctgtcaattgatgagagtctggcagaagatagtgattgcgggataattgctgttgccgttgcgtactcactttgtactcatttttctgcaaagtagccgcttcagtaatgcctaagcgatttttcaaagtaccgtttggttgtaggtagtccgcccatacctttctcattcggctttacgattggtcgaagtacgtattcttgctagcatctcttgtgcgctaatcgggccttcgtcatagaaacgacgagcgtcttgaacatcttccttagtcggctcaaaaccctcatacatattgctgataattgcattcatggtcgcccggtattcctcttgattccgaaactgcacacccatgatggtgaacttctgatcatcgtgttctaaatacataatcgtattctcctcctcgaggtttgtcagtgcggtatacaccgcatcgtccgtagccaaaatctgaatcaaacgtaccgcggtgccacttggttggtagtccgcttgttcccagtgctgtaccgttctaaccgatgtgttgagtaactttgccagctttgcctgactaatttggtaatgttgccgaatctccttaaggattgtggcagttgttttcattttcatcacctcactcacaattatacccttgaagggtacaattgtcgttattatggcctcacaccttagcaaaacagaccaactaatcagaaagtagtagcatgaccaatcaacccattcacgtgcgctattcaataccaaccagtgcccatcaaagtcatgcaccactttttaacaatcgggtggcacattaattaattacgatatttctgccaaatttcacgaacactcgatgatttcatttggtgctttcacgttctaccaacgtcgttcccagttcaatgcgctgggctgcttgacgatcatcttggaatcggctcaccaacaaatcgatggccgtctttcccatcagttcagtctcaacattgaccgagctaatctctggatacacatattcggccagcgtcgtgttattgaaactaaacaacttgacccgctgtggcacagcaatatcagcttgctgtaacgctttgagcgcaccggctgccatcggatcattagcgataaagaaagcgtgtggtaagcggtcacctaacatttcaatggcccgtttcatcatcagataaccagattgactagtgtaatcaccagctaatacatactcagcatgataggcatgatgccgctgcaacgcctgttcaaagctttgctgacgttgattgggaatctccacctgctgatcagtggaccactctttgccataaatcataccgatatctcggataccacgccgccaaaaataatcaacgacgcggttagtagcaaacgtaaaatcagtcaccacactgctgaatccctgagcaaagtgatcgtcatcaacaaaaacaagctggcttgacaaacgactcaactgttgtacttggacagggctaaattttcccaccgccacgattgcatcaatatcatcgccaacctgatctaaattattctggaagatactagtcgtcgtaaaaccacacacttgagcttgatgctcaattcctttacgaatcgctaaataatataagtcatcatgttcttgaatcttagagtaccactgaatcacagcgatatttttccgcattagcgcctttatatgctgacgtttacgcttactgtaccgcagctcgccagcaatcgtaaacacgcgcttgcgtgtctgctcgctcactgatagtgtcttgtcataatttaagacccgcgataccgtcgccaatgagacatctgctcgttgcgcaatatcttttaacgttacggccatcgtcattcctcttttctcttaattaattagcactgaataacaaacgtggggcaactgggcgtgacactattcaccaatcatgactcatcggtaaatcgcgtctgcaacaccccgttgccccacgtcttcatttgattaacaacttaatcgtgcattgctgcgacaaaacgatcaaaggctgcctcaccagcgtcatcccacttaaagaccccagcatcggccagaacccgggcaaagacgttgccgaccgccgtatcaatgacagtcgtcacattgtcagcggtgatggtattagtggccttcaattgatcagcccatgcttgatgcatcgcgaccatttgattaggctgatccaacaagtatttgccgacttcagctaattcggtcttcaaccgggctggtaaaatggcccggcccatcacttcaatcaaaccaatattttccttcttgatatgttgaacatcctgatgtggatggaagatgccatctggaaattcagcagacgtctgattatcacgcaaaacgatatctaatacgtagtcatcgccaactttgcgtgcaatcggtgtcgttgtgtgatgacgtgtgccatccgtataagcacgaacatccacactctcgtccgaataattcttccacgtctcatgaatcttcacagcggcatccgttaatgcaaccaagtcctgactcgtcagccgaatcgtcgacattggccatttaacaatcccagccttaacacccgcgatacctaagtcaatcgtgcgtgcaattggcgctttcatcattggaaattcgtgccgaccaccttggtaatgctcgtgtgacagcattgaaccaccaacaattggcaagtccgcattactgcccacaaagtaatgtggaaattgctgaacaatttcaagtaagttggtaaaagtttgccggttaatgaccattggccggtgctcttgatccaagaaaatcgagtgttcattaaagtaagcatatggagaatattggaaaccccaagtattgccaccaagtgttaaccgaataattcggtgattgctccgtgctgggtaaccgagccggcctagatagccttcattctgcatacatagttggcaaagtggatagccatcttgcggttggttacgcgctgccgcaatcgctttaggatccttttcaggctttgataagttgatggtaatctctaagtcaccaaatggcgtttttgctggaaagaccacgtttttcgcaatggcccgcgtcttgatataatcattagctttgcttaagttaaagaaatagtcggttgccgtttgcggactaacctgatacttatcccaaaaacgttggtttaatacggatggtaacggggtcacaagatccatcaattgatccgctaagatatcttcatccgattgggtcgcttcgatcttgccattttgaatcgccgttttaaccaaggcatcggttaaacttgttaattggtcatcgcttgccgcaatcggatcaccctcgccgaccaaaccaagaacccggttatgcacatagattcgatctaattcagtatattgcgaaggcgacgcgatcaccgccgtgacaaattgatccaaactcgtcattatgcttggcctccccgatcatcatagccggccggatgactttctttccaagtccaagccgtcttgataatttctttcacatcatcatactgaggtgtccaacctaaaacagtacgtgccttgtcgctagctgcaaccaatgtgcttggatcaccagcgcggcgtggtgccatgattgctggaattggcttaccagtgacttcacgagcagcgtccaacatttgtttgttggagaagccagttgaagaacccaagttaaacgcatcactatcgtgcccctgctttaggtattccaaggctaagatatgtgcatcagctaaatcgacaacgtgaacatagtcccgaacattggtcccgtctggagtgggatagtcgtcaccgaagatttgtaattgatcccgttcaccagcagctacttgtaaaataattgggacgagatgcgtttctggtgcgtgatcttcgccgatgctgccgtcaggcttagcccccgccacgttgaagtaacgtaaggccacgaacttaatcccgtaagccacatctgaccagtgcatgatcttttccatcgctaatttactttcgccgtatgggttagttggcacttgtgggtccgattccttgattggcacctgcttaggttcaccataagttgctgcggtcgatgagaagacgattttcttcacatcgtgcttagccatcacttcgagcaacttaaccatccctgccgtgttgttatcaaagtacttgagcggatccttcatcgattcaggaacaactgagaaagctgcaaaatgaatgacaccttcaacgttttcttggtcaaacacggtattcatgaacaccgtatcccggacatcaccttcataaaaacgcgcgtgttcattgactgctgcccggtgccccgtgaccaagttatcaacaaccgccacgtcatacccctttgcaaccaaccgatcaactgcgtgtgaaccgatgtagccggcaccacctaaaactaaaactgccattctaattcctcctcaatatttctcaatgcttactgctaatttgtattttaaatcaattcttttattaaagttccttagggccgtctgcgatttcagcaatgtagaaatcagcgtcgtaaccaatcgtgtcgcgataaactttaccgacgttttccttaaaggcatcgacttggtccttatcaacgatggcaataccacagccaccaaagccagcaccagtcatccgcgcaccaagcacgcctggttgtttccaagctgtttcggccaacgtatccaattctttcccagtcacttcatagtcaaagtgtagtgaaacgtgggaagccgtcactaattcgccaaaggtcgttaaatcatcgtcagccaaggccttagttgcgcgaatggcccgttgattttcgaaaacggcatgccgggcacgtttgattaaggtttcatcattgattaagtaggccgcttcgtcaaactggtcgttagttaaatcgccaagtgatttgatgtctaacttagtttgtaatcggcgtaatgcttcttcacattcggagcggcgttcattatattttgaatccgccaattcgcgccgtttgttcgtattcatgataacgattacgttgttgcctaactttacgggtgcataagaatagtccatggtgttggtatcaagtaaaattgcttggtcctttttacccattccaacagcaaattgatccatgatcccggagttaacaccaacatagttgttttcgcacttttgaccaatcttaacaagatctaattggctaataccgagattaaaaccagtgtttaacatgattccagttaataactcaattgacgcagatgatgataatccagcaccatcaggcatgttgccatggacgtagaaatcaaaaccatgatcgaatttaacgccggtcttcgcgatttcgtccatcattcccttaggataatttgtccaaccagcggctttgtcatatgaaaggtcgttgacatcaaacgtgacgatcccagcatctggaatattagctgagtacatccgcactgtcgtatctgtccggggtgcataaacaccatatgtcccgattgtaatcgcacatgggaaaacatggcccccgttataatcagtatgttcaccgatcaagttgattcgaccaggtgagaaaaagacccgttctggcttggtatcaaaggcttcggtaaactcctgttttaagtcgctagtattcatgaaaaatccctccgtaaatagttttactaaaattttattagtttgactataatgctttttttgattgttgtcaacaccccataagacctttagaacaagatttggtaacgctttacaaatttatcacgttatcgattcaaattcttcttatcgcccgttgtcgttgtcagtagttgttgtcatttagttaaaatttaactaaaacgacatatacaaatttaatattttgttttatgataattgtaagcgtttttatttatgtaactttgaaaggagcttcctcatgcaagctaatcttcaatggttagatgacccagaagtcttccgggtcaaccaattacccgcacatagtgatcaccattattatcacgacacagcagaattcaaaacgggtagtcgcttcatcaagagtctcaatggcgcttggcgttttaacttcgccaagacaccggctgaacgcccagttgatttttatcaacccgatttcgatgcaaccgactttgatacgattcaagttcccggtcatattgaactagccggctatggtcaaattcaatacattaacacgctatacccatgggaaggtaaaatttatcgtcgcccaccgtataccctcaatcaagatcaattaacaccaggcctattcagcgacgctgcggacaacaccgtcggctcgtacctcaaaacctttgatctcgacgatgcttttaaaggacaacgtattatcattcagttccaaggggtagaagaagccctgtacgtctggttaaatggccattttattggctacgctgaagatagtttcaccccttcagaatttgatttgacgccgtatattcaggaccaaggtaatgttttagcggttcgggtctacaaacgcagtactgctgcctttattgaagaccaagatatgttccgtttctctggtattttccgtgacgtcaatatactggcggagcctgctagccatattactgatttagacatccgaccagttccaaatgccaatctcaaaagcggtgagctcaacatcactactaaagtaaccggcgaaccagccactttagcgctgaccgttaaagaccatgacgggcgagtactgacgagtcaaacgcaaaccggtagtggcagtgtaacctttgataccatgttattcgaccacctgcacttgtggtcaccacaaacgccgtatctctatcaattgacaattgaagtttacgatgctgatcaccaactcttggaagtcgtcccatatcagtttgggttccggacggtcgagctgcgcgatgacaaagtcatttacgtcaacaataaacggttggtgatcaacggggttaaccggcacgaatggaacgcccacaccggtcgcgttatcagtatggctgatatgcgcgctgatatccaaaccatgttagctaacaatatcaatgccgatcggacctgccattatcctgatcaattaccttggtatcaattatgtgacgaggccggtatctacctaatggccgaaaacaacctcgaatcgcacgggtcatggcaaaagatgggggctatcgagccttcttacaatgttcctggcgataatccacactggttagcagcggtgatcgaccgggcccgttcaaactacgaatggtttaaaaaccacccatcgatcattttttggtcacttggcaatgaatcgtatgctggcgaagatatcgcggcgatgcaggctttttataaagaacacgatgattcacgactcgtccactacgaaggtgttgtccacacaccagaattaaaagatcgcatttctgatgttgaaagtcggatgtacgaaaagccccaaaatattgtagcttacttggaagataacccaaccaaacctttcctagattgtgaatatatgcatgacatggggaattctctgggcggtatgcaatcatataatgatttgatcgacaagtatccgatgtatcaaggtggctttatttgggactttattgatcaagccctcttcgttcatgacccaattaccgaccaagacgtgctccggtatggcggtgatttcgacgaacgccactccgattatgaattctccggtgacggcttaatgtttgccgaccggacaccaaaaccagcaatgcaagaggtgaaatattattatggcttacacaaataatcaactacacgttatttacggcgacgggagtttaggactacagggggctaatttccactacctctttagctacgaacgtggcggacttgaatcactcgtcgtcaacgataaagagtggctctatcgtacacccacgcccatcttttggcgggcgacaaccgataatgatcacggtagcggcttttcagtcaaatccgcacagtggtacgcggccgataagttctcaacttgtcaagatatcgaattgacggttgacgaccaaccagtcacaccgttaccaatcgcgccactcaataacaaatacacggatcacgaaatcgccacgaaagtctcactggcttaccacttcgttaccacgaccgttcctagtaccatcgtcacagtgacttatacggtgacggcagacggtcagatcaatatcgccacccattatagcggtcagtctgatttgccagagctacccgcatttggtctgcggtttatcatgccaactaccgcgaccggcttcgactataccggtttgtccggtgagacttatcctgaccggctggctggcgcaacgcacggacaattccacgttgacagtctgccagtcacaccatacttggtcccacaagaatgcggcatgcacatgcaaactgaacaagtgacagtaacgcgatcaacaacacaaaataacgctgaccacgacaacacaccgttcagtttgacatttagccaagccgatgcaccattcgccttcagctgccttccctataccgccgctgaactagaaaacgcaacgcacatggaagaattaccattagcacggcgaacggtcttatcaatctacggtgccgttcgtggggtcggtggcattgatagttggggaacagacgtagaatccccatatcatatccccgctgatcaagacattgacttcagctttaatattcatttctaaaagttattttgatttcaaaagaacgctccggcgagttatttgccagagcgttcttttagattaacgatgattaagttttaatatgtttaatggctgagcttagtccttagccttgaagtaatgtacctgcgccgtaaagtcactagtttgaacgggagtcgtgtagagtcctagttgcatcaattcatcgccaccgtacattttgtttgtgtcggtctcaacgtaggtctgctgagggtctaatcccgctaacttcgtaatatgcggttctggttgaactgcacctaaaataacgaaggtgagcagcaaggcttctttctgatccggactaacaaacatccacgccaccgtattagattcaaacgggctctctaatcgataaaaggtcccgtattgaactaactcacggtgctgcttatagaaggcaacctgtcttttaacggcctgcttgtccgcatcacttagttgggccgcgtccagttcatagcccaaggtaccactcattgccacagcaccacgcatcttcatcgacgtcgaccgtcctaacaattcatccgggctcgtcccaacatgggcggtaattgcagaaattggataaacgagtgaagtcccatattgaattttgagccgttcaatcgggtcattattatctgatggccaactctgtggcatataatacattaaaccagcatcaaagcggccaccaccgccagagcagccttcaaataagatctgtggatagcgttttgttaaacgctccatcaagtcatatacacctaagataaagcggtggctagtctcaccttcatgagttgaatcgctatgtggcgaatagacttccgttaaattgcggttcatatcccacttgatataatcaatgggcaccttatcaagaactgcggtcatttgttcaaaaatattgtcgacaacatccggctggctgaaatcaagcacgtattcgttccgcgataacgttcggccacgatctggtacgcctaacacccaatcaggatgggcccgataaagatcggaatcggctgaaatattttctggctcgaaccaaagtccgaaccgcatccctttatcatgggtccgtttgctaatatccgctaagcctcctggtaacttgttccgattaacaaaccagtcacctagcgaactattatcatcatttcgatgaccgaaccaaccgtcatccagcacaaacatttcgatacccagtggtgctgcagcatccaagattgattgaatcttgtccgcatcaaagtcaaagtaagtggcttcccaattgttgatcaagatcggccggagatcgtgcttgtaacgactgcgcgccacgcgatcacgcaataaatcatggtaggtttgcgacataccattaagccccgtcgtcgagtataccattgcaacctcgggcgtttggaaactatcaccggccgccaatcgccagtcgaagttatattcattgattcccatagtcaagcgtgtctgaccaattgggtcccgttctaaactaatctggtggttacctgaataaattagcaatgcaccaaggacattgccttgaaattcattagtattcggatcagctagcgccacaaaaggattcatatgatgagaactagcaccccggcgactttcaaactgagttacacctcgatggagccgttcacgactaagctggcgctcacgcgcatagcttccaggtaacgaaatggcatctaatggttgggttggcaggtccatctgcatcgaagccactttttctaagtcgacagcttgctcactgtgattaatcaaccgggcgctacgcgtgataactggccgatcccgataaatcgtgtaggctaattcgagtgtcacgcctaatgtggcatctcgcaacgtcacaatcaaagtttgggcttcatcctcatcttcgacataagtttgtggcaagcccttaagttccggcttaccggcttccatccggcagtcttgataacgaaaatcaactgttcgagcaccattggccgcgcgaataatcgcggcgggttgccgataatcaccggtattattgccaccgtattcctgtggcaaatcatccttggaatagcttcgatcagtcgtattcggtaaatttcctgagaacccccgatcaatccggggatactgacgctcgccatgataaccccgaacccgtgggccaaagtacaagtgggccaacacgttgcctgtctccacacctagaatatacgagatttgatcgttatgcaggtgaaagacaagttgttcttcatcaatgtcaattaaagtttgctgcaacgttactgccatagtaaaatcttcccttcgctattagctttttctatttcagttcacaaaaagagctattaatggctcgcgtcattaatagctctcctcgtaaagaaactatgcttgatccggtaagccgacattcgataattgtaagacatcttcatcatcttgtacggtggttcctgaatctttaagatacgtaaattcgggcatatctttatagtttgtaataacgaccataacggtatcatccaagccagccttttcaattgctggttgccagaattcaattaattcttgcccttgtgtgacatggtcgcccttctcaacgtactgaacaaatccagtcccacgcatcttaacggtaccaatcccaatatgaattagcgttaaaataccggtatcagaacgtaatccgattgcatggcgagtcgggaaggttgcaacaacttcaccatcaaatggtgcgacaacgcgaccatccgttggtttaatggcgaaacctttacccatactaccgtttgcgaaggattcgtcagcaacatctttcaaactgatcagttccccggcaacaggatcttgataaaccgtcgtcttggcatcggcttctgcttcaacttcagcaggagtttcatcggtttccaagtgagttgaccatgttttttcaagttcatcaacgatttgtgcatgcatcttttcatccaacttaaccttcttgaagaagatgaatgtcccaatcaaaatcatagcagcaggtacaccgaacatcattaacttgaagatggcagcgccatggctagtcacatcaccagcagtggcaccagctgtcatcccagcccaaacagcagttaaaccaacgacaccgttagaaatcgcaccgcctaatttatcaagtaaaggccgaacggataaggttaaagattcgtcacgatgaccaaacttcaactgcccatattcaacagaatcactcaaaaccatcaaaacaactaagaaaattaatggttgtggaatgtagaataatacggccgctgttaagatcattggtaatgactgaccagcaaaggcaaacatgatcagtgaaatcatcataataacaactgctaagaagaacactttacgacgactaaacttctttgctaatggtgggaaggccaatacggcaaaaatcccaataatcgcatttagcgaacctaatagtgtaaacttcgaggcgtcacccaaaatataggtgaagtagtaaagttctagtgagttcgtaatggcaatccctgccgtgtagatcccatacatcaatgataaccacatcaattgatcgttacgggctaacactttgaagacttccttgaagctagtcttttcagtgttcttacgcaattcagaatcattttctttggttccaagtgcaacaactaaggcagaaatcaaagcgattgcggcaataatgatcccaaatgccatccaaccacggttgtcaccttgaccactgttagacttaacagaaaacattaagacgattggcataacgataaccccaacgatgttggcaccaatgttagagccaacccgggcgtatgtcgccgtcttttcacgttctgctgagtcaaatgagattgctggaatcattgaccaaaaaccaacatctttaaacgaatagaaaatatccattgtaatgtataaaattgcaaaaataattaaatatagaatggggtttgaggtatttaatccgcctaaactcgtgaataaaagtgctaaaacgacggaacctataattccaccaatgacaatccatggtttaaagtggccccaccgagaattagtattatcaatggcattcccgatcaaaggatcaattgctagttccacgaaccgcaaacctgcaataatcatggtgatccaagcaatcatttgtgttccttgagccccactactcttatcgaacaagtgggaggtcacaaacataataaaataagttgataaagtggcatagaaggcatcgtgcccaaacgccccaaacgaataagcaagtcgcgatgttattttacgacctttactctgctttgtctctgcatccataatctcgcctcacatcttccttgaataatttacaagtttaaatgtaatcgttttcagaagtaatgtcaatgatttttagtaaaatttgttcaaaagttttatctataccgcttttgattaggacctgctaatgcgcctatcgacactgattgcccgctttccaagggcttaagcagtatagtactcattatcttaccaatgatcatcgttttactaatcacggtattaatcagatgctcgggactttgttaactaaattaaacattgtttactcatacgtttacaaaaaaggcgccaggcagaactcgcctgacacctcaactagtattaatttaaccgttcatattggtaccgaatcgtatgcgtcactggtgctcctggacgtaacacaatatcaccaaaatcaggatgattgattgcatcaggaagtgtctgggcttccgtcgctaacgcattatattgatgcgcgtcttccttatcagcatcaaacggattagccgtgaagataataagactattgcgatctgaataaatttttacttggcgcttatcatcagtatccccaacgatagcaattggttctgccgcacttggggcaacttcatacgcatcgtcaaattcaatgccaccattctcagtcttcagctggtctaatgccttttcaactggttgtgcctggttaaagtcatacgctgtgcctttaactgctaatttcttaccagttgggactttttcatcatcaaattccaagtgagctgcactcgtaatctgtaatttttgttgggccaaactggtccgatcatcagttgtgttccaataaacgtgattagttggattaaagagggttgctgcatcagtatcaccggtaaatgcaatggatacttgatcctgattatctaatgtaaacttgatagcgacatccatatttcccgggtaattatcatcactggcgttgatatgcttcttcaaagtcacactgacactatcattggtttggctaaaagcaccttcaaagttcagcgtgttaaaaccatgattcccgccgtgtagcgaatgggtttgttcgttcatatcaacttgataggattgatcatcgattttgaacttagcgccgccaatccggccagcaacccgaccaattgattgacataggcagtatcccactcgttgatagtcagtcatgttatcaaggccccaaatcaagggatgttcaacgccgtcttcattgacgacgaattcttgccacgtcccaccataactaaggaccgagatacgagtttgatggtcattgaccagcgtataacgcattacatcttgaccatctagttggtcaaacaccgtttttttagtttccaaaatcatgcacctccgtgttatttaaaccgctttcatttagaagtataccagaatttcttgaagttgagtaaaacttttagttaaaatactaaaagaacgatctggtttctatcccagatcgcccttcactacttggaacttgctcgctcaaccagattagtacccagctcaacccgttgtgtcgttgttcgccctgctagtcgactgatgaccaaattaactgcggtcgcccccattaactcagtatctacgttaactgcgcttaattcgggataaacgaatgtcgccagcgaagtattgttaaagctaaatagcttcactcgttctggcacctggatgccactagcttgcaacgctttaagcgcacctgccgccatcggatcatttgccacaaaaaaggctcctggtagttgatctcccaacttacgaatggctttttgcatcattttaaacccagattcactagtataatcgcccttaaaaacgaacttaggatcaaacgcatgccgtcgttccatcgcggcccgaaaacctagcatgcgtcgatcaactaccgctaactgatggtcggttgtcatttcttgaccgtgaataaagccaatatgatgaaagttgcgttgccaaaaataatcgacaactttttctgtggccaaccgaaaatcagtaatgacactatcaaaaccagcatcaaactgatcatcatctacgaatactaagttgtcagttactgatgccaagtccttgacttgtggctcgctgaactttccaactgcaatcactgcatctacgtctggtcccaattcttgtaaattattttggaagatccgagtcacttcaaactgattatcttgtccacgacgttcaatccccatccggactgacatataatacaaatcatcttgttccttagattccgaataccattgaacaatagcaagtcgcttacgcgccgtcgtgacagtatgccgtttattttttgaatactgtaatgcttctgctgcatctagaattcgttggcgcgttgtatcactaacagacaatgactgatctttgtttaacacgcgcgataccgttgccaatgatacgccaactttatttgcaatatcttttagcgtcgccgccatgaattggcccccttaaattcaaactaattcttactaccatctaaagtcgctatcgcatgatttatttgcaaattattttaattttcaagtattgcgccgaacttcaacgcataatcgtgataactatcatgtaaaactttatcattaattgtgaaaattggcgaatttaaacactaatttatttagtaaaggcccccctgtgcgtgcaaatctgcaaaattatgttattattaacttaactattaggtacagaaaggccatatcctcggatatggccctttcttttgcgtctctataacattgactatagcgaattgtgcaaacgctatgatcgaccagcattccaatcaattgccggttgttcggtaagaatctgttcaatcgttgctaattctgattcactaaatttcaacttttccaatgcagcaacgttattaaccacctgctctggccggctagcaccaatcaagacacttgctaaggctggctgacgtaggttccaagccaaagccatttgagctaagctttgctcccgttgttgcgcgacttcatttaagcgctttaccgtagctagtgtctgttctacctggactggactcaaaaatggaattgtttgcttattggcccgtgaatctgtcgtgattccgtgcagatacttgtccgtcaataacccctgtgatagtgagctaaagccaaccgccgccttatgagttgcttgtagaacggggaacaagtcctgttccacctgtcgattaaacatattatagcgtggttggtgaataatgtatggggttcctaatgattcaaatatcttggtcatagcagccgtctgcttgccattataatttgaaatgcctacatacagtgtcttaccctgccgtactagctgatcaagcgcagtggccgtctcctccattggtgtttcaggatcaggacggtgactataaaaaatatcaaagtagtctaaaccagttcgctgcagactctgatcagcactggcaataatactttttcgtgacccccaattgccgtatggtcccggccacatcacatagcccgctttactagcaatgaccatttcgtcacggtatggccgcatatcggtagccataatacgaccaaaattagtttctgcactgccgggctccgggccatagttattggctaagtcgtagtaggtaattcccaaatcaaaagcttgatgaatgattgccttttgattagcgatcggatcaacgcttccaaaattattccaaagacctagcccgattgctgacagcttcaaaccactattgcctactcgattataaatcatatggtcatagcgcttctggcttgcttgatacatattaaacaccctctcgttattcgttcctagctaaagttaccgctttcattagtaaaaagcaacgcctggttttaccatgctacctccgctaagattattgagacatcgaacactctcacttgataatttatatatatcaattacaatatattatgagaatataaacgtaaaggagtacttattatggaccctaaatttattgaagtgatcaaagacacgacccccgcaaccatcgtcacggtcaacgccgcaccagcacacgtcgtcaacacctggagtcattatatgcagcttattgatgatcataccctattgatcccatcggctggcatgcactcaattgaggccgattttgctaccgacaaccacattacaattgctgtcggtagttacaagattcccggcacaactggtactggctgtggtttccacattcatggtaccggcaagtttgaaactagtggcgcttatttcgatcaaatgcatactaagtttgattggattcgcgcgaccctggttgtcacaatcgacgatgtggaacaaaagatttaacaactaaaatctagactaaaagaacgtacacgagttgtgtacgttcttttagtctagacagtagttaattcgtcactgtcttcttagatgctaattcaagcccctctaaaaagtgcccaaagcactgcttcaagaagtgttcactaccgtcatcattcagatgatcgttctcatcaaacttattgccggcttgaggtaacatgaactcgttaccaggcataactttggcatccacaccgggtgagtccaaaatctgtcgtaagttcatctgagcacgtaccgtaccttgaatacctaacgaagtcccaacaatcatcactggtttgtctttgaatggatgttctgcacaggacagccattcaatggcactcttcaaggcagctggaatcgaatgatcatattctggcacgccaaagacgacaccatcagcggcttcaatcttagcggctaacgcttttacacttgccggttcccgatccatatcatcttcattgaatagcggtaaatctttaatttcacaaatttcaaaattaacttgcgtttcaaataattctttcatggcatacaacaacttacggttatatgattttgaagcgttagtccccacaatggccacaatattggcttcgtcatcgcccgcggttgcctgccgctgagcgttttcgctagccgcggcgccggcaacgtaacccgacgaaatcccccaagtattcatcatacttggcattgaatcatgtccgttagcgccgccgatgatttcccccgcaccaaagtaattagctaccggtgcatttttagtcgttaccaattgcaagttatcagcatcaacactatagccacctaaagtcgtcgcaaagcgatcacgttgttcaatgatgtagaatgtttcaccttcaaattggtgcaagtacttcggatcacgaccgaaatcatgatcgtgaccatcttgaacatagccttgataatttttgaccgtttggactaattcatcaaccacaatcccggcctgctcagcagcactttccaaagaacccttaacaaatactggccgtttacccttattctcaaagaagctcttaatttcttctggtgtgaaatcatgcaggatcagtaggtcgtaaactttcttccaagtccgttcatccattactaggtaagcaactttatccgcttgtttaaggatggcattccgaaaagtcgtataaacatttgattcgttaacgattcgatcacccttagagttaacgtaaattgcacccatatcagttgcttgtttcgacgcgtacgtggtcaatttagcaacgcctggttccacttcaacaccatgtggatacagcttgtaccaacctaaatcgtgcgtttgcaaatccaaatcaccattaaattgataggcatccccagtggaagtcattgggccataataatcaatgccttcgctttcagtaccacgcatcttttggttagcgccatgaccacctgcagcaagcacaactgaacgtgccttgatgttgactgtttggtccttttgagcagcaatcacaccgcgtaactttttatcgttgtccaacataagcttctcgactcgagtatccaacataatttgaccacccgcagcagcaaacgccttcgaaactttttgaatgaattcatagctacttgctgaaggtagttcaatctgacggttaatcgaatgttctggcgtttgcgtctgtgctttttgataatgtaaatctgcaaacttactaataaaatcaatggctggaccaatgttatgcaccattaggtcggtcaaagctggatagttcgtctccaagctttcacgagcaacatcttgtgccaacatttctggcgtatcatgattattatcaaaaatttgcgcagcaacatcagacccggtaccaacaacgttagaaccattcagaatcgtcgcaccaccaagatagccgttcttttcaactaagataaccttctgacccattgtcaacgctcgacagccagcgactaagcccgcttctccgccaccaataatgagcacgtcggtccgcaagttttgcgtcttgggggcttttttcttaggaactggctgcacatcaacaccagcatcggttacagccttatctgccgacttaagtaacgcttgggtcatcaccgttgcaccactaattgtgtcaacattgaatgattgttccgtaatgatattttgtttcaatttatcaatgacttggttaaagatccccgacgtttcggaatgctttaatattttcaaatcctcaatcttattatcttgcacgtcaacttcataattgataataccgttgtggcccattgcttggccggtaatttgttttttactcaatagtaaacactcctttgcgtcgcggcgttaagccactggtaactgttacctgttgttcatgatcaataaaaattgcttccgtatgtggcaactgttcgattagttgacaaccacggtttggcccttcaaagtaggccaccgttgataacacttcagctaattctgaccgttcagttataatcgacacctgatcaacttgattttcaaccggataaccagttcgcggatcaaggatatggtggtagcggtgattgccaattttaaaatatcgttcgaagatacctgacgtcactaccgttctagcaggcgtttcaacctgtagcgctggatagccacgtggcgcttcgggtgcttgaattccaacttgccaacgccgattatcggttagcggattggcccctaatagcttaacgttaccaccaagattaacaatagcgctggtaatgccagcctgctgtaactgcttaacgacctgatcggcaaaataccccttggcaatcgcaccaagatctaattgcatgccagattgacgcaagtagatactcgattgggcttcatctaggataacttcgtgcgtatctaataaggctaatcgttggctaattcccttggccgctggtacttgatgcccaccaaaaccaatcttccaaagtttaaccaacggtccaattagcacattaaaactatccgcatattgctttgtgtacttaatagcatccgacactagttgaaagcattcagtgctaaccaaaactggatgaataccggcatattgattgatcgcagctaattctgaatcggcacgattgacagaaaagacaccatccatccgctgcaagtaatcatagaccgcttcgaccgctaactgattcggctcaaataatgtcagcgagatgacggttcccatcatcgtaaattgtgaaacatactttttttgtgtcccaatcatcactctgacctcacgatttctttcagttatgctttaatttaacttcagatcttccaattccggccgtaaattttcaagtgcaatttgcccaggtgccgaagccgccccgaccgttgcaaatgataaacaagagccgaacacttcaccagcaagccgtgacacttttcctaagtcacccatcgacattgtgattactggctgtggtagtgtttggcgtgcaatattagtcgctgtcagtaatgttaagacatcctccaccgattgtggcatcacagccatcttagcaacgtcagcaccataatcgaccatactagtaaggcgcttaacgatctcagcaaccgccggcgttttatcaaaatcatgattactcatgatcacaactacttgatgctcatgagctgctgcaacaatttgtttaacagcttgttcgtcatggtaacgctcaacatctaaggcatccgtgaacccaccatctaagaccgtctcacacagtttaaaatactcagtatctgatagtgctaattcgccgccttcacctttagttcggaaagtagttaataaggcaatatcacctaaagcctgacgaagttgctgaccggccgatttcaacttttctggattaattacatccttgaaaaaatcaattcgccattcaacgacatctggctgtgcagctaaaatcggtgtcgtcgctgctaaaatatcattaatcgtcgttcctgtgataggcactgccaacttaggtcgaccactaccaagttcaatatttcgtagctttatcgctggttgcatcttaacttgcctcctgtcatcaattatttatcctgatcatcactaaacagaatctgatgaatgtaatcaactggcatgtcttcgccagtccacagcttaaaggctgctgcaccttgttcaagcatcatacctaaaccattgtaaacatgcttcaatcctgcttgacgagctaccttcattaatttagtcgttcgtggtgcatatactgtatcaaacacaatttggtctgagctgaaccaactaggatcgtccacaagcgtcttatcttcaagtggtttcattccaacacctgtcgaatcagtatagatataagagctttggatttcccgtttgaaatcatcacgatcttctaatgagtgtaaagtggcgtgacagtcggtctgctcattaattagtttaacgttccgttcggcatttgcccatgttgcatcgtgcatattaaaaatagatatttctttgacaccatccaatgcagcctgcactgcgatcgcagtcccggcaccaccagcaccagctagcgtcattttatgttcgcgaatatccaagccttcatccgcgagcgctttcataaatccgatgccatcagtcgtataacctgttaaaacaccatcatcattaacaattgtattaaccgcacccaccattttagctgctggatcaagcttatcaagcaatggaatcactttttgcttgtttggcattgaaatattggagccacgcatatcaagtgttctgattgactcaattgcacttggcagcgtttcattcgtcacttcaaatgctaagtaagcgtaatttagtcctaatttagcaaaagcattgttatgcatagttggggacattgaatgacgaattggatacgccattaaaccaatcagtaaagtatgcccatcaattcgttctgccatgaaaaaccactcctaaatattatttttatctgtttgttactcaattcacttgttatgttagcaaattagtttaatataataaatatggatgagttgtttaaatcatcaaagttatctatgagtaaaggagcattcctcatgaatttaagacatttagtttttttcaaagagctagctcgaacacaacatatggcaaaggctgccgaaaacttaggtatctcacagccttcgttgagttatgccatcaaaaaactcgaacacgaattgggtgttccactttttgaagcagatggccgtaatatcaagttaacatcaattggcggtgtttatttgaaatacgtcactgctactttaaatgatttatcacaaggcaacgaactcgtcaaacaacttatggatccagataccggtcatgttaaattaggatttacctacacccttggacagcaactagttcctgagttactgtcccatttcaaaaatcaaagcgaaaatcaagcaattacttttgagcttggtcaaggaaactccggtgtgctcctgcaagcactagccgatgaaaaatacgacatcgttctagcctctaacgtcgatagactgggtgagcagctaactgcccatctctttgactttatcccactagttcaacaagaaattgttgcagttgttccaaatgatcatcccgcggtacaaaaaaatccgctacacgttgaagacctagcaccttatccaatgatcttattttcacagaatagcggcttgcgaccattaatcgaccaaatcctatcagcagcccacgttcagcccaaggtagcttatgaagtagaagaagatcatactatggctgggtttgttcgttacaatatgggtgttgcgctaatgccctacttaccacttttaaatcccgagcgtgttcaaatcaaacacttagctgatcagccattacaacatcaaatttacttagtcgttcgtcgcagtggttttattacacctgccgtccaccgtttccaagagtttattcgcagttattgttggcaacattacactaatcaagaacgatcaatctaaaaattgcgcctttattgaaggcgcaatttttaattaactttcaacaccggaagcagccgacgtacgtgttgaccgaccaccatgtttcacaatcaatgctaaaccaaccccaattaacgtaatcacaatgttcattagaattatcatccgtggcgcatcagcaccggtaacttttgtcaagtatgccgcagctgataatacagcataattagccacgcttgaggcaatcattacaagggatgtcgctagacctttactatctggaaagaaaccaatggtcgtagaggtcgccaattgtagtaccccaccagcagcagcgtaaccaataacaaaactaccaatatagagaatgactggattattaatgaaataacataacattaacatgacgattgaaatacttggatatagtactaatacggtcgtctctttcagccccatatggataaactgagcagttaataagaccgctaccgttgcaccaaccgcataaaatgattgcaggatactggggtctttgattccgtaactagctcctagctcttgattgcaattcaaccaaatcataaacgtcgctgaactagtaaaaccaattaaaattgatgcaatcgcagctggtgtgaaacgatgcttcggtttgtcagtagtcgttttagcctcagcagttgctttatcttgcttaggaaatggtaaaaccagaactaagattgcatcagcaatcattaaaattccacacccgataaaaatgactcgatatgacatttgagcactagcaaccaaaccaataacgaacggcaatacaaactgagcaaccgttatggcaaactttgtaaatagatttgcaattgaggccgatttaggaaagatttccatcacacttggtgacacacaggtatccaagaacgaattagcaatcccgttaataataccaatagcatacgcccaccacatgctgtgaactgtgatcatcccaaaaaagaatacggcgtacaacgcaattccaatgaaaccactgatacgacgcccaatcctatcagagactggaccagcaaatgggtaagcaatcagccgtcccagaccataggcagcaatgacagaaactaccatactaacatcaatggttccgttagccagcgtggatgcgccccacgcctttgcaaactcagttttatactgtcccattattgaagaggcaattcctaaaataaagtaagcaaagtacaatgccaatgctgttacataatatttacggtttgaatttgtgttacttgtcatcttaacgtcccccatcatctgagaagaaccgttgcgttacttcttcaacgggcatttcttggcctgtgtacaatttgaacgctgcggcaccttgccaaaccagcatccccttaccgccaattgttttgcttccatgttcagctgcatctgctaacatttttgtggtaacaggattataaacagtatctgtcacaactaaatcagaacgaaaaacggtcatatccttaatattagtttgttcaacattcggtgccataccggccttggttgcgttagccaaaatatcactttgtgcaattgcttgtgtcaagacttcctggtcattaatatcgcctacagtaacttggcatgcgggaactttatccatgatcttttgagccgttaactcagcattttgataaaacgagtccttaggattaaagatatgaatcgcctgagcgccatctagtgccatttgaacggcaattgctgtagcagcaccaccagcacctaacaccgtaaggcgctttccctgtgggtcaacaccatgctggcgtagattttcaacatagcccgcaccgtccgtattatgaccaactaacacgccatcattattgacaatcgtattcacagcaccgattaattctgcagctggtgacaattcatcaactaattctgcagcaacctttttacaaggcatcgttacgttagcaccacgcatatttaaaacgcgcattttagttaacgcactggccatttcatcagcctgaatgtcaaaagccaggtatgcatcattaatacctgccttttcaaaactgtagttatacattgctggtgagcctgaatggccaaccggcgagccgaaaaggcctagcatagttgtgtgtccatcaattcgtgcttccatctttttattgcccctttctaatgctgcttagctgcttgacgtgcctcgtaggcttgatattcggccgttggcatagccttacctgtaaagagtgtgtatgctgcatcaccttgccacaataacatgcctttccccggcgctaccgtgcatcctaatgcctcggcgtcttcaattaacttggtctttagggggttgtaaacagtatccgcaacaaccaagtctgaacgtaaatagcttggatcgactaatgattgaccgtccagcggcttcataccaacaatagtagcgttaaccagaatatcagccttctcaatctcagcttttaacttgtcttggtcttctagatgatagacgttaacgtcgacttctggctttgcttccttaatcttcttttgagtgttttcggcattcgcataaaagtcgtcctcacggttaaaaatagccaatgatttagcaccatctaatgcacattgaacttgtagcgccgtagcagcaccaccagcaccaatcacgactagctttttaccagcaatatctacaccgttctctttcagattgcgtacaaaaccaatgccatccgtaatatgacctgtcaacttaccattatcgttaacaatgacattaatagcccccacaatctttgcggccggtgacaactcatcaacaagtgttgcggcaacgcccttacatggcatcgttacgttgctaccgcgaaccttaaataatcgtaatgcatcaatcgcttctggcatttgtgcttttttaacatcaaaagctaaatatgcatagtctaatccttgctcttgaaagctaaagttatacattgccggtgaacctgaatgacctactggagaaccgagtaaggtaaataaaccagtggtacctgaaattcgtttttccataattgttatctcctcttaattaataaagaaagagaccgagacagtcgtcccagtctcatccacgagttcatgtaactgaattaatttctattttttcgctggttgatgatgatcaatcgcgtattgacgacgaccacctggctttggaatcatgtcagaaatcatcatattcaaaccaccatcaacggtcacttcaccaccattagtgtagtcagaacggtcactagccatgaataagaccgtattagcaatatcatccaaagtcccaatgcggcgactagccactaaccgctcacggccctcttcaactttaggatcactgtaaaagttctcagataacggcgtcttaaccagacaaggtaagacacagttactccgaacaccatactgtccccattcagcagccatttgcttagacatcatattaaccgctgctttagttgtactataggccccactatatgtttcaggataacgtgacgctacggttgagatgtgtaccatcgcaccatgtttctgttgaatcatgacgcgaccaaaccgttgtgacattaagaagtaacccgttaagttaacattcaaggcagcttgccattcatccaaacgcaagtcttcaagtggtgagaagcgtaaaatagcagccgtattaactagcacatcgacttcaccaaacttatcagtcacggccttaacagcagcatcaacttcctcttcgttagtcgtattgcacttaacggccaacgtttcaacgccatacttttctgtcaatttctttgcgtacgcttcggttttatccgcaatcatatcaatcaagacaattttggcaccctgcttagcaaactcttcacagaacttggtacccataccaccaacagcacccgtaattgcaacaactttatccgttaatcctaaccaattattattcattaataatcactccttataatcaaatatctaagcttgaactggagcttttaaaatttcaggccacgcttcctttaaaacagacacagtctgcttataggtgtaatccgcaacataatcaatacccttagccatgtattgatcagagattacttcgacaccaatcaccttaggatcaacacctgcatcttttatcatcttgacaaacccagcggtatccaaatcaccagcacctggagccaaccgatcatgcattgattcatcccgtaagatagaatcagcatatggccgagtatatgcatcatcaatttgaattgaaataacccgctttgcttgttcctcggtcaacaagtcatatggttggttggctcgtacccaatgccacatatctagtaacatatatacattgtcacagttggctttttgcataatcttccaagtcttgtccaagttaggtaagccactgtaaggcattggttccaatgcaataattaaatcacccgcccgggctgctaattcttgtaacttctttgctgtatagtcaatatcataatcttccatcaatccggtattaatatgctttacaccaaataattcacacatatggaagcaagcctgttccttatatttttgttcgtatgtgcgcgttgcttcacaccactgaacaatatattcgacttcggtgcaacgaatattatacttatccaaaatagcgagaatatcatcgtccgttaaaccttcgttcaaggcatccacgtaagtttcagcgcgtaacccaatgccatcgtaaccagcagcactagccgctttgcaacgatcttcaaatgtacattgatcaccaagtgtccaggaactaattgtaattggatgtgattttgtcataataatttcctccaaatagtggattcgacacatgcatgttttgtgattcacataatttattttacaagttaaatgtaatcgctatcactcgactcgtccaattgcttttagttggggctatccatagccaaaagttattaattctgttatattaaccgtagttgttaacttttgagtatcaatcgttacccgtcagaatgaacttcgggaggttatttctatcatgaatttggatcatttacgatacttcgtcgcattatcaagaactgaaaactatacacaaactgccaagctgttacatattacacaaccaagtttaactaaagccatacactccttagaagcagaattgaacattgatctctttcaaaaagccggacgtagtgttactttaactcctgctggtaaggttttcgctagtgatgtcgaatccgcactcctactactcgacaaaagtgtgactaatattaaacgttttgatcaacaaaaagcccccattcgtattgccgcactccgaacactaagtattaagtggttgccagatattgcccagcgttttcttcaactaagcccccatgccgctgtccaatttcaattcaacactgatactggcctgtccccagatattctgaacggtttacgtaacaacaaatatgatgttgctttttgctcaaagatggatcactttagcgatatcgagttttttcccgtcgctgaacaaactatggtttgcatcacaccaactacacacccactggcaaaccgctccagtatcaatttggcagaaacattagcctatccccaaatcactttttcgcaacgcagtggacttcatccaattatgcaaaaactatttaacgactgtggcggtcaacccattagtgcatatgccgtagaagaagatcaggccatcgccggtttagtggccagcggttttggaattgccgttgtacctaatatgtctattcttcaaaccatgccagtcaagattattccattgtcatttccaacatggcaacgaattttgtacatgggtacccttaagcaccgtacacctcaacccgctgttgaagagttcatcaccttcgttcgtgatcaaagcaaaacactctctgttaacaatatttaactctgaaccaataaaatcgcattcgattaatagcttctagctatcgattgaatgcgattttgttattagacacttctcgagaccgtgttaaaatttgaagtgaatcaacgattgtgaatttagtatcaattaaaaatattaataattataaaccgtttacttgattgatttttcaacatttatattggatattaaaaatgccatttttgttgcttataacgtttaaaaatgcacactttgtgaaaataagaattggtgggtgatactatggaacttaaagaaaagcaggatataaccatgaaacataagacatatttaccattagctgccggaatttacttaaattatgctattttaggaatggctactattattgtgtctcaatacgggactcaattccaagcactatggcacactgatgttaaagggctctcaactgtcattgcaatgattggaattggccgcttattgacaattctcattgcgggttatctttctgatcgcttggggcgtaagggaactatgttaatcggtatggttgcacaaattctatttcttatgggcctgttctttagtactaatctcatcagtgcttgcatcgctgcactctttatgggcgcaaccaattcctttggtgatacagctagttatccagcactgacagatgctttccaagagcaagctgctagcatgaattcgttagtaaaagcggccatgtctcttgcacaattcgtcctgccgttcattgttgctgctcagccaaacgctcaaatcacactagtcgtcatggtagttgtgatggttttagatatcatcttaattggacttgccagcttcgcaccacaaacattaactcaaaaacacactaaaattagcgacgagcctaaaacaaccattaatcctagtggcaatcagccttcgatgttaattgatggtagtttgctaataattgttggttttacactttcatttacgttttacattttctctcaatacgcaccaaacttcggtagtagcgtcttaaagttggggctaaacagctctaaatcactaatttcatggtatgcaatggcctcactagtatccgtttttattacctcctcattagtaactcgcattaagccaatcaagttgatctttgcttacactctgatttcgttcctagcattactccaaatggtggttatccctagtgctgacggtgctcggttaactgccattgcaattggcttcttcgcagccggaggtatttggcaattaggattaactttactaagccaatactttccagctgagaaaggtaaggtgactggctactatagttttgctactgcactgacattctttgtaggtccattagtctctagcttcatcattgatgacacagctgtcagtgttctacatgttttcgaaatcgatactggcgtgacgctgctcagtcttgtaatcgttatcattttaatgattcgaaatcgcaagttttctatgtaaaacagcacaaaaattagtaaaatggctatagtttgaggaacttgattgctcaatctgtagccattttactattcaataatatcgttaatctcatagtgccaacttcacacctgacaaaccactcaccgactaacacttaccaagatttgaaccaccaccatcaaagtcgccaaaatatccaacacccagctgctccacacatagtagttctccattggccgatatttttggcgggttaccttgagatttttttcatataaccggttgaagaagataaatagccagataaagaaccacagaatcaggcaaaagacgggataaatgaagatattgctcttgattccccacggcgtcagactggtgacagcggttggcacgtagacacgattaggtagcagtggatatgcgataattgccaataatagcggtaataacgctaatcccgtctgccgccacaaattatagtggccgtgctcatctttaacattaaacattgcgccaacctcccttaattaaccagtgcatcgcaaatggtaattgatgattccagagccgccaatcatggtgacccggttgtaactgccattcaaactggtctttaaacacagccgccaactctggcttgaaggcttcatccattgaccgtaacatatcttgatcacccgtcgccattagaacacgtaacgtcccccagtttgtcggttgctgtaccaagtaagacaaatccgctggcgtcccttgcatctgtgctggtgagaaagccagctcaaggtctggcataattgccgattgttccacgtgaaaccttttgagatccgtcaccggtgatagtgccgcgacagccgcaaaccgctgcggataggtaaaggcataacgtaatgccccatagccacccatggagttccccaacaaataattgtcttccggtcgtgccgacaacgggaagatataacgcattcgtgttggtaactcgtgggtcaagtaatcccaatagcgtggaccatggaccatattcgtataaaatccccgccccgtttccggcatgacgaccgctactcggtattgcgttgccagtagttcgatttccgttcgccgtaaccacgacgttgcgtccccacctaagccatgcaacagccacacagttggaagttgctgttcaccactactgtagtctggtaaaatttgtccgaccgcgttcactggttccggcaagataacttggacttgcactgactgtcgtaacacgttggaataaaagttattgctatgaattgacattgtgtgccactcctctctttatgcatcgatcatcgaattcggttaggatctaccgacttggaatcactagttagcgccagcccaaaatagttaggcaacatgtaactaacggtatattccagcgtttcttccccttgaaatacccaccgttcgatcttaatcaccatcgtatccagactcacgtgcaaataatccgcaattcgttgattaggaacgcaggtcgccgcatattcttgctcaaagggctggcgtgataaatcaagctgcgcatgtttcctaattagtgcataaatcgaatgtacggcccgtaacttcttcattgctgtggcaggaatcagcgtcgccaaataccacgactgcgaaaattcaaatggtgcgtgtctaatttcgcgtaatcgctctaaataccaggttgtcgattcagccgtaaacttagcccgtgttggtagtggcgtcgtctgattggccactaagattgcaacctgttcctcatcaacatcgtatgtatgggtatccgtaattcgtaccgcagtcccccgattaaatttggaaacaaagctgcccttaccctgaatacgatagatataaccctgatcggctaacatattcagtacccgcacgactgtcgtggaactgacttgatacttcttccgtagctcactctcactataaaacggatcattctttcgaaaatggttcgtgttcaattccagaatcaaggcgcttaaaatggtttgataaattggttctttacgactcatggctgccccccttattattaacttaatacattaaatgtctatacttaatcaaaatttacccatgtcaattaactaacaacaatgaaagcgttaactatactgttatattatgctatactcactcatgaaatcaagttaatgtgttaactcaaatcaaaaagggaggacttaattcaacactaacttgtcattactaatttgttaaggagatgaatgaattatggataattcacgtacgtggaaagataagacgattgatgtcatgagtaagatcgcagccaaccgttatttacgtgctattcgagacggaatggccgtcattattccagttaccatcgttggctcattctttacgatcgtcacgcaactacctattactgcttggacaaactttattaaaccctatgccgctggtttagcaattccaattaatttttcaatggggtttatggctatttacgccgcgtttgccattgcaggtcggttagctgaagattatcacttcgatcatatttcaaccggggtcgtctcagtgatggtctttctattgttggcagttaaaccaattacgaccaccccagcagctttcaaagcgttaggactaaaggccgctgccaccgtggtgccgctaacacacttcggggctgcggggttatttacagcaatgctcgctgggattctaacggccgaagtgactcggatctgccgcgatcatcacctcgtcatcacattaccagatggagtcccaccggctgttgcagcttcattctcagctttgattcccgcgacttttttaatcgttggtgcttgggtcattcacgttggtttgaactttgacgttaatgctttcctacaatgggtcttcagcccattagcctactttggtcgtgacaatttactttcagttatcgtaccaatcctcttaactgatattgtttggctattcgggattcacggtgctgctttagccaccccaatcttctggccattatggtatccaaacctgaacgataacttagctgccatttccaaaggtgcaactgctgcaacggttcctcacttcatgactgaacaatttttccaatggttcgtctacattggtggtgctggggcaacactgtctctctgtatcttattagcatttttctctaagtccgcttacggtaaaacaattggacgggttaccattatcccaggaatcttcaacatcaacgaacccgttatctttggtgttccaattgtcatgaacccatactttgcaatcccatttgtcctcgcaccgttaaccatggggattatcacttgggctgcaactgttctacatctcgttagtcggacagtagctttagttccatggacattaccaggaccaattggggcgttgatgaccactgcttgggactggcgagcagccgttctatgtattattaatattattgtggccacctttatctattacccattcttcaagatctgggatcgtaaccaattgaaggctgaacaagacgctgctaaagccgatgctgaaaaagcagctcaagcagccgttgccgaataatagcttgcacaaaaatcacacggatttgtcattacggtatgcttaaactaacgactactttcaatgaacatgattgcttatttgctgacaatcggtctgactttagcgccaaccgtaattagccattatgatcatgattctgggaggactgctgcattggccgcagtcctctttgtacatattctaagaaacgagggaaaacgattgaaatctgatattaaccaacttactactgagggtcgtaatcctgccagtaacgacttagacgaaatgtcgatcctggcaattgcccagttaatgaatcaagaagacgctaaagtcagtcaaagcatcacacccgaactaccacaaattgccgctgctattgcccttatcgtcactgcctttaaagctaacggccgcttaatttacatgggcgctggtactagcggtcgcctaggcgttttagacgctgctgaatgtgtcccaacatttggtactgaaccagagatggttcaaggactcattgctggcggggctcaagctatgacggtcgccgttgaaggtgctgaggataatcctaatttaggcgcacaagacttgaaagatctggccttaactgctaatgatgccgtggtcggcctggcagcaagtggtcgcacaccttacgttatcggtgcactggactacgcacaaaaaatcggtgcggcaacgatcagtctagcctgcaataatcaggcactaatcagtcaacacgctcgggttgccatcgaagtaacccccggccctgaagttctcgctggttcaacccgtttgaaagccggcacagcagaaaagatggttcttaacatgctatcgacaatttcgatggccaagatcggcaaagtttaccataacttgatggtggacgttaaaccaactaacgaaaaactcgtgattcgcgcgaaacacatgatcgaactggccaccggcgtttctgccgatgaagccagcgaactattcgctgcagctcatcaaaacgttaagacagcgattgtcatggacttggctggcgtctctgtcagcgacgccgagcagcgtttacagcgcgcacacggtgtcgttcgtgacgcactcgcactgcaatgaggaggtctaaaatgacatatttaattggcgttgactgtggtggcacgcacatcgttggccaaacttggacaacagcccccgagcatctggtccaaagcgttacgggtggccctggtaacgttgtcctagactactctgctgccgttactaacttaaccactgtcttagaccagctcactgccgcaattccagctagtcagattgggttgattttaatcggaattgctggcattgaaactgctggccgggctgatcaggtccaaaaaaccatcacccaacgttaccacgctaatacccaggtcataagcgatgcaaaactggccctactgaacggtcttgcaggagcagacggcgccttagtgattgccggcacgggttcggtcgtttatggccgccaagccgggaaatttctgcgcgttggcggctggggttacgttttaggtgacgaaggcagtgcctatgacattagcaagcgggcacttaaacaggttctgacccagactgataacggtcagactagtcaactaacagctcccctattggcacaacttaaagttaccgatattgctgccgccgtccagaaattttacgctcaagatcgacaaactaacgctcaattagcacagttaatcgccaaactggccgagcaacaaaattctgaagccatcacggtattagtcacgtcagcccaagcactggcacaacaagtcgttaccttatatcagcggtttgcagagtcccggccacaacgggtcgccctctctggttccgttttacaacacaatcgcctggtccgcgacacgttaacgacgacagtgcaccagtcaataccaacaattgcatttaacgatattacaactaacaacgcccacgccgtcatctattggcaccggtggactcaggaggaaattaattcatgacaatgcgtcaactaggtttatccatttatcccgatcatagcgactttgaagaaaacgccgcttatctcaaattaggccaacactacggcttcactcgaatttttatgagcatgctggaagtatctggtacggtcgccgaaaccaaagctaagtaccagaaaatcattgacgttggaaatcagttgggttaccaaacgattttggacgtttcaccacggatttttaaacaactaggaatttcctataaagatctaaagtttttcgctgatttacacgtcgccggtattcgactagatgagggtttcgatggcgcgaccgaggcgctgctctcgtataatccgtacggcttgatcatcgaacttaatatgagtaatgacgtcgattatctgaataatattctcagctaccaagcaaacgtcccatttatttatggctgccataatttctatccccaagttggaaccgcactaccttacaactttttcgttaagtgtagcgaacgttttcgtaagttcggcattcactccgccgctttcgtggcaagtcaggttggtacgatggggccatggaacgtcaacgatggtctgccaacattggaagctgatcggcgcttaccaatcgccgtccaggccaagcatctcttcgcttccggactaatcgacgatgtaattatcggtaacgcttatgcgagtgaagccgaactggccgcattatcagcaatcaatcggtaccaagtacaatttcacattgaatttgaagctcagacgaatgcgatcgaaagaaccattgccttgaccccacaacattttcgccgtggcgatattaacccaaatgtcatccgttcaaccatgccccgtgtgacctacaaggaaacgcccaacagtccacacgataatgatgtggaatttcagcgtggcgacgtattagtaggcaacgataacttcggcatttataaaaatgaattgcaaatcgtcttgcaaccccactgtgaaccccgaaagaatcggattggtcggattgcacctgaggaactgttactgcttgactttattaaaccttggagtaaattccggtttgtggattgaatatagtaaaaaatatgttactgattataaaaaagtctatctcgaaattttaataatttcgagatagacttttttagtttaatccaacttatcaaagcaaatttctgaaattcacatgctattttaaactgggtggatgctaacagtatcatttcccatcagttgatcacaccagcggcaagtcagttcttataccacgtaaatccaccgtcattaaccaattaagctagatcttcaccattagatttaatgaccttctgataccagtagaatgaatctttcttatagcgtttcagacttcctttgccggcatcatcctggtcaacataaataaaaccatatcgcttggacatctctgaggtagaaaaactaatcaaatcgattggcccccacatcgtatagcccattagttgtacgccatcctgaactgcagctttcatttgcgcaatatgtttacgtaaatagtcaattcgatacgtatcatgcacttgttgatcagttgttaattgatctagagcgcctagcccattttcaacaacaaataatggcttacgatagcgatcccacatctcattcagtgtcactcgcaaccccaccggatcaatttgccaaccccaatcggattcctcaaggtaaggattacgaccaccagtagccatattaccgttcacttgttcaggcgcatcagcttgagttaccgttgtcatatagtaactaaaactaataaagtcaaccggatacttcgctaaaatcttctgatcatctggtgccatttgaagttgaatatcattctctgcaaaaaaacgattcatgaattctggatattccccccgagcttgaacatccgtgaagaataagttcttatcgtcttccacttgagcagcctgaacatctgcaggattaggtgtcgctgggtaagtttgcattcttgccagcattgacccaatcttagcatccgggtcaatagcatgtaattgtttggtagccagtgcactagcgataaattgatggtgcagcgcttggtaacgtaactgcatctgatcatgcgccgaattctcagtatcaacagctccagtggcatgaaacccccaagttccggtattaatttcattaaaagttaaatagtacggaacgcgacctttaaaatgtttaaaaacaacttcagtaaaccgattaaaatcggcaatggttgcccggctggcccacccattttgcttaagcgttaatccaatgggcatttcataatgtgacagtgtaactaatggttgaatgtgatagcgtcgtaattcatcaatgactctatcatagaaagcaagtccgtctgaatttggcttgagttcatcaccttttggaaataatcgcgaccaagcaatagagaaacgataaactttaaatcccatctcagcaaatagtttgatatcttctttgtaatgatgataaaaatcaacacctcgacgcttaggatacattgtatcagtttgatcatctagcgccgtttgaattgaagatatcgttacatcatccattgacatatgcttgcgatccgtcgtttttttcactacttctgccgttgtcaggcctttacctgcttcattccaggcaccttcaacttgattagctgctgtcgctccgccccacaaaaagtctttagggaacgttttaggataagttggtttatacattagctggtgctccttccatgatctccttaggttgtaattctaaaatccaattatcactagcctccgtcgcatcagttggcttgaccatttgatagtcagccgtattcgtaataatgaccatgacagttgtatcgtaaccagccgttttgatcttatccacatcaaatttagttaataaatcaccacgtttgactacttggttttgcttaaccattgtttcgaagtattgaccatttaattgaaccgtattaataccaatgtgaatcagaatttcagcaccactattggccgtaattccaatcgcatgaccagtgggatatactgccgtaattgtcccatcaacgggcgctgtgaccgtccctttatttggaacaatggctaatcctttgcccattgcttcagacgcaaatacttcgtcatgaacactagtcaatggaataattgtcccttcaaccggagccattactgtgttatcactttgatcacttactactgagtgatcagcctgctgttgacgagcgaatccaaagaagtacgttaagatcgcaccacctaagaatgctacaatcaatccaatgacttcacccataaacccatgtcctagaaaagttggtaccgctaataagctagggagtgtaaatgagctagcgtgcataccagcggcgccaataattgcaccaccaagggcaccacccacaacggcacaatagaatggtcgttttaacttaagcgttaccccgtaaatcgtcggttcggtaattccaaacaatgctgtgacaaaagaagaccctgctaatgctttcattttttgatctcgtgacttcaaaaaaacagctaacgcagcaccagcctgtgataatacggccgcactaagaattggtaacaacgggtcataacccatcttagcaatattattcatcatcaacggtacgaacgtccaatgtacaccaaagataacaaagacttgccagaaggcacccatgataacaccagcaccaattggcatgaagttataaattgccataacaccacttgctaatccattaccaatgagtcccccaattgggccgacaactaacagcgtcaatggcaccatgataattaatgaaaagaggggcgtgaaaatattccgaattgccgctggaaatagcttgtccagtactggctctaaatacgacaatacccaaactgccagcagaattgggataaccgttgacgtgtatgttgttggaaccaccggaataccaaagaaatgtagtgttgttgaattcgtcataacagttactaaagttgggtatagcagagctgcaccaagtgacaccgctacaaattggttaaccttcaactgcttagcagcagtaaatgctagaaaaacaggtaaaaagtaaaaaatagcatcaccagcagaataccaaatcttataagccccactagtcgttgacatcaaattaaaagcaaccgctaaagctagcaaccctttcaaaataccagcaccagccaaagcacctaaaaacggcgtaaagattccggagataaaagcaataaaccgattaatgatgttttgcttttcacccgtatcttccgttgtagtagctgcatcagccgccgtatcaggatttgctaatcctgctaaatctgctaaaacggcaaagacctgcgccacagcattaccaataacaacttgatactggcccgcgctttgaacaaccgtaatgacaccatctaagttttcaatcgcctcagtattcgctttgtccgttgactttaagttgaaacgtagtctggtcgcacagtgccatgctttgctaatattatcttttccaccaatattggtaagaattgattgtgctaattctgaataatccatacactttttcctccctttataaaacgacaaaaacccaagtaggcccgttatcaacactaaaaatacaggttgactggttgctacttgggttttgcctaatcgaatagttacaatcccaaaaatattattgattctcgttcaacatccgctgaatgtgcatgattaagtaaatacgctcattcaccgaaacagtctgttccgtcgacttcttcacaaaaacagcgattttttggacacaggcaaaggctcgggggtattgcttagataaatgttcaaataagaaatcatcatctgccccttgggattgatcaggtcgtttcagcgttaaacgctccgcaaaaaagcgtagatgaactaaaaatcgttgcaaactaacactctcatctggcatcgttaatgacagctgatacttaacaatattcaaaatatcattaatcaacttagtcattgcaagtgtttgatcagtgttagagtcagccatactattctcaacaaacttcattgcaataaatccagcttcatcttccaacaacgtcacatcaaaatgctttttaatcagtgccaatgcttgcataccgacttgaaactcacggtgataaattcgcttagtttcccacaagatttcattatgaatatccatctgatggtggtgccgatagacagcaaagtgaatatggtcagtcaatgaaatcaacaaataaacattaaaagtcgtttgcaattgttgttctgccaactcaataatttgcgaagcaacttcaaaatattccggttcaatatctgccatcaagctttggaaattactaatccaattatctccttctggcgtataaatcttagtaatctgttgttgctcaacatcgtcaccagtatgctttttgaacccgattcctttaccaattaagacaacttcccgtccatttttttcagccaataggacgttattattaaaaacctttttgattcgcatgcgcacgctcctcgactctcatacctaaataaagaaaaaaacctaataacccactgcatccgtgctatcaatcacgaatacaatcgattaattaggttttgcccactagctaatgttagcggtaacaatccttatttacaattagctagtatagcggtttcggaaaacgattgcaagcgttaaatgtcaatttctatcatctcagcaatgatatattgctgtcagatatcactaattgcatttcaactacttcaaatatttaattaacgtttcatacgtatcaacattttgtagctgcacattactgagctgtttaagcctagtgtataaataactgaatacctgcccactatctgcacgtttttcgttagcaagtactattagaattaagtaaatggggttaccatcaattttcattattccatcaaaagtaatcgcaaagactttatatgcatcactcaattccgtggaggcgtgcggcaacgaaacatggtttaatactaattgatttccggccgcctctcgtgccagcaaggccttactctgatcattggtcaacagtccctgttctgcaaagttcgttaacccggctttcaatgtttggttaacgtttatatatttagtaggagcatgataaaaatgacttttaggcaaaaagctagacaagtttttctgaatataactttcactactcaggcttttaagatgctcaagctcatcgagactaatgacaccattgaatgtactatcaaaattaattggcaattgtaagtcgttaggatgaacgccattgccaataactaaattataattgatataatttagacgtgattctaactgttcctttgaaaataccatctcaatatcaatattggaaattttctgggtaataatcattttattgatatttgctacagattgttgtgttgcatacattaatgtacgtacatttctcgcagttggcgattcaatcgcatgtaaaacatacaacgcaatatattcatcatcaatctgaacgctttcaaaacactgttgcaacttttttgatagatcaaacgcaaagtcaaaagcaaacggattttgaactttcaaataactaatctgttctgacaaagaggcaggtgcaatcgttggaaacattgcgctacgacaaagatgtttaaaaatctcattaacaaaggaatgattaaacgctgcaagtgtataacgagatctggtcgctctaactgccaactgcacttgacgaattgtcatatgattaagcaattgcttcttagcatcaaaaaacactgccagtgtggctgactgcaagtgcgggacaccgcttttgagcaatactttataaagcgtgcttttcattatcacagtattatctttactaattagtgtacaagccataatttgggcacttagttgtgaatcagttaaataatcaaacattttttccggtatttgttgtttaacaatcatccttatcctagcaagatcctctgactgattaattaatttaaaccttttttctactaattgatgatcgtctgaaatcaaagccgctagtatgtcaatctttgaaatatgattgacgcttacagaaattcctattcgtggccgtaatctgatttttaatatctttgcatattgccgatttatcttctcaatacagttcataatactttgtcgcgacatgaatgttcgctcaataagttcgcccatcgtaatattaggagacactagaagatttagcaatactaacacactctcatggttggactgtgtcagtaatcgatttagatttgccctatttaaaacaagaagatgatatttttttacactttcaatcgagccaatactttcactacgaagtaaaccattaattctagcaatatctcgtacaaccgttcgacgtgatgtctctaagagtgctgccaagtcctcaccagataaatcatgctcttgtagtaataaaataattcttaattctcgtgaattcaacataccttacgaacggatcccgtactccattcttttcagtccttcctgcaatttagaaataggacaagcaatattcatacgtaaataatgactgtcaccatatgttgtccccgacatgatcccaactcgacccgtattaacaagtttatcttgtagtttttcagccgttagacccaattgcgagacatccatccaagccaaataagtcgcttcaggctgcttaaatctaatctctggtaactgactttttaagaaagtagatagataatcaaagttattttgcaaatacgttatgagttgtactaaatagtcacttccagtattataagcagccatctgagattcaattccaaggatgctagctgatgataaagcatttttttgctttaattcacataaaaacatctcacgtagttcagcctcaggctcaaataaatatgcgccaatcaacccaggggtattaaaagttttagtagctgaacaacataggaccacattcttagttgtaaattcggttacaggcgtatatgctgccttttgatacacaatgtccttatgaatatcatctgaaattataaagacattatattgttgacatagtgcaactatatgcttcaattcatcatctgaaaagaccttcccggtaggattatgtggattagtcaaaagtaaaatttttgttgctgtttgctttaaaacagctttcaaagtatcccaatcgatactatagtcttgttgtgcactgcccagtctgaccggcgctaacacccgctgattatcctcaatcacatgataaaaggcgtcatacataggagtgaagaccgctacactttctccaacggctgacttcattcgaataaaggtggcaattgaaaaaacaacactgggactatataaaatccaatctgggtttatagtaacttgattttgagagctaaaccaattaataatactatttttgtaatcctcattattccagcgtgtataaccataaataggatgtttaatacgctgttcaagcgcctcttggacgccaacgggaaccggaaagtcagtatctgaaattgaaaatggtagaatgtcagaacgaccaaagcgatcttgaatataatcccactgagtactgtatgtccctctacgatttataaccttattaaaatcatattgcatgtttaccgctcctattttatacaacaataagcaggtgtgttaattattcacacctgctcgtggtcatttcactatgacaggtgataatcacttatttatcgtcaacctgtgctaacttttcttgttcctttttctcacgacgacgtaaccaagccgttttgaaagtaataataaagaatacgttcaataccagaccaattatgacagacaagtaaaaccaataccacggcttctccaaaccaattaacggatcaaaaataccaattccaggtgccatacgctccacatttaacattattgtaatcgccccagtaatcccaccggctaaagtattagccgcaatcatcggcaatggtgctgctaacgcatatggaattgccggttcggtggcaaccgtcataccaacaagaaaagcgctccaacttgcagcccgttcttgctttgtaaagagtttagggcgaatccaagttgaaattgccgcagccatcggtggcaacaaagttacaacccctacaatcccataccagttataaattccagaactgagtaacgaaaaactgaaaaaccatgctgttttattaattggcccccccatatcaaaggcaagcatacaaccaactaggaagccaccacctatcttcatcgacgttggaatattcttcaaaaatgctaacagaatactcattaaccagcccatgaacggccccagtagataatacgtcagtagcccaaaaactagtaatgttacaaaaggaataatcataaaacctaaaatagactgaaagttcttaccaagacgtacttttttaaagtatttaacaaaatacccaacggatagcccaattacaattgcacctaagaaccctgcaccagactgagtacctagcaagtcagtatcattagccaaaaaagttactaagaatgctggtgcaaaagctggcttatccccgattgcaaacgcaatatatgcacccatgattggaatcataaaagtaaatcccagattcccaatactggtgatcacccaagccaacgacggtgatacacctttagctaaaggtgtattcggcattccaaattgaaccatcatgctgccaattgcaatcaataagccaccgccaattacaaatggcaatgcggcggatacacctgccatgagataactcatgataccgtcagtaaccgcatcctgctcactgcccagtttcacttttgaagccgtaaagatttctgcccgatcctcgatattatcgaataacgtatcaatctcttttaatgcttctgatacgggaagttcaacgacccttttgccattaaaacgttgtttgtcctcatcagtcattcctttacctaatgctaagatgacgtagttggcggtagcaatctgttctggtgtcagtttattttcaacaccactggctccctgagtttcaacgtgaaccccataacctaatgatttagccttttcttcgattgcttcagctaccatgtaagtatgcgcaattccagcaggacaattagtaacggccacaatttttagatttgccatatagatttacctacctttctaactgattgcttgattaataatttccaaaacttctcgtgtatcccctcgttttaaaatctctacaaaatcttgatgcactaattttcgacttaactgcgctaacagttttaagtgcacatcgccttcatttgcgggcacaagcaaactaataaacgtattgacgggtttaccgtctaacgactgccattcaatatcagtagtactacgaccgaataaaatagctgcagttttaacattatttgattttgcatgtggtattgcaataccattaccaaatccagtagttgattcttgctcacgctcctgataatctttcactaaagagtcacgatcaacaactaaattcagtgacgtggctaactccgctagactaactaaaatttctgcttgcgtatgtccttccaagctcatattcatattattaattgtaaacattgccatcttgataaagcctcctctttcgttttcaaatttattgtataagaaaacgctttctttattaatgaacaatatgtcacaataaaagtgacacatctaatacatatcagttactacacgctctagcgcacttttataccactgtaagttaatttgaataatgttctacacacaaattaacggcaccataaaaggcactaccagtctatttattggctggtaatgctttttaaaaatcttatgcgtcgtagtacgcttaatacttattcaagtttaagctaataaaagttttgacgatattatttcttaattaaaagcgaaaaagatagcgctttccgaaaaacgtgtagagcttttaatagatccaaactatctcaactagcttagcgtaatcttcgctactgtatccatcgccgtcacattttccgtcgaattaacttctatgttcgccactttgtccatattagtcacaactgtaatgactgttgcttttttaccagcagcacgaatcgcttcgagatccatagttactagtggcgttcccgctttgactttgtcaccaatcttgattagggcatcaaatggttttccatctaattcgaccgtatctaatccaagatgtaacaacagctccaatccatctgaagttgtcatcatcactgcatgttttgtatcggcaagtgtcttaatttcaccgtcagcgggtgccgtaatagtaccttgcgttggctcaatagcaaaaccatcacccatcattttctgtgcaaaaacctcatcggggacctgcgtaatgggaaccattttcccacttgcaatcgcctttaaatcaagactcactggctttttcttaaacccaaacaatgaactcaccttctaattaaaattttctttaattgcttcgcgtgaagcaaccagttgtttaatatgtcattcataatcattcgtaataaaagtataataaagtaaatccacaacatataattgagccattaaagatgtagtagcagcagcgcgtgctgtttgattttcttcgctgtcatcatttattaagattatatctgctaacttacctagtgtactggttgcatttctactcagcacaatcacagggatattaattgaatgtgccaagttagccagacgaatactttctgatttttcaccagaattagaaattagtaacaacacaacattttgtcgttgcgttgtcatacctaccgctaacaaatgcggatcctgtgaatgaataacagcttttccaatacgaatgaacttttgttcaaaatctgttgccactacattggaggcgcctaacccataaacataaacacttgctttgtcagcaattaattgactagctgcttgtaaggctgcatcatccaatgaacgattagtttcatcaatcgtatgtgtgattcgcaatgctagtttagatttaatagcatccaagctatctttggggttaatttcatcatataacgtttgatcaacggtgctttcagctgacaaccgtagtttcaacgccggatacccaccgtctgggataagtgtcttcccaaatcgcgccaccgtagctgtgctgacgcccgtggctgcagctaattcagcggtactcattttaatcaccgcattagtatggtctaaaatataacggccaatcttttgttcagcttttgaaaaattctctagtctattatgaatcgtaaataagacactcgtcatatggtgccctcccaattacaattactcgattagttagctatgcctcgataacatggccttccttatctttagcaattttagcactacttgggattccaaagaagtaggtcgcaacaaacccaccagcataggctgctaataatccaatcacgtaacctaaccaatgaccgttagcaatcaatggtatcaaagccacgccagaaggaccgattgcagttgcaccaatatttcctagaccaccaataacggcacctccaataccaccaccaatacatgcagtaataaatggtcggccaagcggcaaggttactccatagattaatggttcaccaacacctaacacaccaaccggtaaagcacctttaatcatatttgatagttgcttgttattgcgacaccgaatccataaagccagtgctgcgccaacttgaccggctccagccattgctaaaattggtagaagtggtgtcattcctaatttattaatcatttcaatatgaattggtgtcaaaatttgatgtaatccaaacataaccattggtaagaagagtaaacctaggacaaacccagaaatagcgccaccaacattcaggatccattcaatcgcaccgactaagctattcgaaataacaccagcaatcggcataactaagaagattgtaaagaccccaacaaccaataacgcaatagttggtgtaataatgatatcaattgaatctggaataaccttgtgtagccatttttcaacaatcgccaatacccaaacagcaaagataaccccaataatcccaccttgaccagcagacaacgcttgtccattgaagatgttgtggattggtgcttgcggtgtcacacctgttaacaacgtaacggccccaatcacgccgcctaatccagcggtagccccaaaaaccgttgcactattaataccaacataaataactaagtatgagaacagtccactattaattacttttaatactgttataaaatctgtccagctcttactaatgtctcctgctaacatcatgttagaaagaattgaagcaatcccagatattaacccagcaccaacaaacaccggaattaatggaataaaaatactagaaatggcactcaacactttacgaactggtgtttgtttgattttagctttttgggcagcgtgaacttccttagccttcgcttcaaccatttccttgtcacgttgatgttcagacttagtagccgttgcatcactagtaaacgtgctaggatcaggaaatggctccccgagtccaaccccaacttgcttaaccattacgtctgcaaccttatcaacagttccagggccaacaataacctgtaaggtatcttcttggacaactcccatcacgccatcaatagcctttaatccatccatatcaactaatgagtaatcgcgaattgtcatccgaacacgtgtcatgcaatgaatcaacttctcaatattctgtggcccacctacatgcgcatagatagcatttgcaatccgagtatacttatcttcagccatatgaaacccctcctttaattaactgcttgtcttacaaaaccgttggcatgatctaatcgaacactagcttcagctttgctcatattggtcaaaaccattacaatggccaacttaacgttctgatcagcagtcataaagactttcaccgctgtctcatccgaacagtccgtagcttgaacgataattcttttagcacgttctaccaacttttcattcgttggtttgacgtcaaccatcaagttcttatagaccttaccgattccgaccattgatgcagtcgataacatgttcaaaactaatttttgtgccgtacctgatttcaaccgcgttgagcctgttaatatttccggtccaacttcaacttcaatcggaatttgagcatgctgactaatactagcatcagcgttacaagcaatacttacagttgttgcacctacttcgcatgcataatctaatccaccaatcacgtagggtgttcgaccgcttgctgcaaccccaacaacagtatcatgggacgttaagtgaagatcaaccaggtcttgctgtcccagctcaattgaatcttcggcaccttcaacagccaccgtcattgctgacattccaccagcaataagcccctgtaccatttctgggctagtgccaaatgttggtacgcattcagcggcatctagaacacccaatcggccactagtccccgctcccatataaattaatcgaccgccagctttaaaattagctacaattttatcaacagcacattcaatttgtggcaattctttagacacagccactggtactcgttgatcctcctgattcattaattccagcatttctttaaccgataacatatccagtgccatcgttttttgattacgtgtttcagtcgttaacttttccaaattcattgcttctcatcctttctaataaattggaccgcttgattgctgcctattaatgccaataaagataagtcagtcgtcaccacttgtcccacaacattcactcgcgggtccgcactcaatgactgtttcaagatttctagctcacccatataccgaccataacgcgaattatctacagtaattgttcctaccgggcgttttcttgtctgcatcggtggcattgtctttattttttgtcgcccttcgaccaaacgaattacatcacgggcgacatctggacgattatgccagatatcttggtaaaggcttgccattgaggtttgaatggatagttgcaaaatattatgttggaaatacaatcgaaattgttccagagccgccctgcttaaagcaatgtcgccgatataaactttatccgttgccaactttcctaataaattcaatgttgaggccagtgggtgccggtaacgatcaccttcaagtgtaggtaacccagcaaatacaggcccgcgtaattcctcatccccggctacgaatgccatagtagtgaagccttgttgctttaaccaattatttttactttggtaccactcataatccagtccagtcgcgggacgtggataataattatgccaagcttccaaatgttgaaaattagcatcacactcatgtaatttagcaacatcgctcgcactgatcgtactagcatttagtgcgactggtagctgtcgtgataattgtgcaatctgcgccggattcaagccatcatctactcgcagagctgttagaccaagatctgttaattgctgaatgttattgatatcaatcgatattcgtttcaagccattagcggagacatcagcagtaagtgtcagccccagctgacggcaaactgttcccaactctttcaatcgtggtacataacaactcgcatcatcttctggaatatgcatcgaagtaaaaacaccttcgaagccggcattcctcattgctttcatctgtgcaattctctcgttagtgagcgattcatttaaataaactgaaaatcccagcataacttcctcctgaatgatagcgttttcatcaacaaataaaatataccacctttgtaatttaattacaataaaatcagcaaaaatatattattaaagaaactaaattacttttattctgatttttgacaaaaaaatattaccggccagtactgccagtaatatttttgtatatccattaaattttctatttctttgtcagcccattatgcttaatcacatcttgataccagtagaacgacttcttgggatagcgagctaacgtcccgtggccctgatcatctaggtccacgtaaataaagccataccgcttactcatctcgccagttgatgcactaacaaggtcgatgcaaccccatggtgtgtagcccatcaaatcgacgccatcatcaatggcaccagccatcgcttcaatatgttgcttcaaataatcaatgcgataatcatcttcaacatagaaattcttatcaggtttatcaatcgcacctaggccattttcaaccacaaacaacggtttctgatagcgatcatatagctcatttaacgcaatccgtaacccggttgggtcaatctgccaaccccagtcactcgccttcaaaaatggattcttgacgccgcccatcaggttaccagcaacagtatcggttacactacccgtggtttccaccgcgctcgacatataataactaaacccaatataatcaactggatattgttgtagtaatgccaagtcgccatctgtggtctccagatcatcaaaggtcagattatattcagccagcagtcgcttggtataggtcggataagctccacgtacttgaacatccgcacagaagaagttgaaatcttgattatgctgcaaattagccagctggttaactgggttcgaatcataagcataactagtggcatagagaatcatacagccaacctgaatatcgtctcgcaattcgtgggcgattttgactgccttagcactggccacaaactgattgtgccatgcctgaaaaacgttctttttgtcattagcacccgtcgatggcactaatccttggcccatcaccggaaaatgtgccgcactattgatttcgttgaaggtcatccaatacttaacctttgaagcataacgcgttaagatggtccgcgcgaaagtttcgtagaattcaatcaaataccggttcttccagccaccataccgtttggccaagttcaatggcaattcataatgtgagattgtaatcactggttcaatattattggccaagcattcgtcaatcacatcatcataaaactttaatccggcttcgttaggttgcgtttcatcaccgtttggaaaaattcgtgaccatgcaattgagaaacgataacacttgaaacccatttcggcaaacagtgcaatatcttctttgtaatgatgatagaaatcaataccttcatggttcggataggtgtacttatctgtatcgatcgtccagtcaaaatctggttgactaacgattttaaatcggtctttgccacctggtaacgcatccgcaatcgataagccacgaccaccttcttggtagccaccttctaactggttggcagcagtcgcgccgccccatagaaatccttctgggaactctgacatttaatcaacaccctttctagttagctaataatgatagcccttacaacaagtataatcaatcattggtctgaatatcaattattaataactatcccaaatcttccccattcgaagcaattactttcttataccagtcaaatgagtctttcttcatccgcttcaaactaccattaccttcatcatcttgatcgacatagatgaagccataccgcttagacatttcggatgtaccggcactaatgacatcaatgcaaccccaggtcgtgtagcccatcaaatcaacaccatccttgactgcttctttcatctgttcaatatgttgacgtaagtagtcaatccgataatcatcatgaatcttaccatcggcgctgatttcatcttcggcacccaagccgttctcaacaacgaataatggtacccgatagcgatcccagaactcgttcaaggtaatccgtaaaccaactgggtcaatctgccagccccaggcactggatttcaagtatggatttttaccacccattgataagttaccactggcttgttcaacatcatcagtcgccgaagtaatcgtcgtcatatagtaactaaaacttaagtaatcgaccttgccttcagctaacaattgttcatcgccagctgccatcgttaattcaatcccgttttctgcaaagtaccggttcatatattctggatattcaccacgtacctgtacgtcagtaaagaacaaattcaattgatcttgcaattgggccgcccgaacatcagctggattaggcgtattggcataagtttgcatccgcgcaagcattgagccaatttgggcctcaggatcaatctcgtgacactgcttaactgcaattgcacttgcaacaaactcatgatgtagcgcttggtagcgtaattgcatttgatcatgtaagcttagatcactatcaattgcaccagtaccagtaaatccccaagttgaagcgttaatttcattgaacgttagccagtacttcacaacacccttatagcgtttgaatagcacttcagtatagcgagtgaaatctgcaattgtcttgcgacttgcccagccattattcgttaatgttaggtttaatggcatttcatagtgggaaatggtcactaggggctcaataccatacttgtgacattcagcaaaaacattgtcataaaacttcaaaccagcttcattaggttcagtttcatcacctttaggaaagatccgagcccatgctaaggataggcggtataccttgaagcccatttccgcgaatagcttaatatcttccttgtagtgatgatagaagtcgacgccacggcgcttaggatagagcttatccgtttgatcatcaatggcagcttggacactctctttagtaacctcgttcatcgacattactttgcggtcagtagccttctgaacaacttcagcagttgttaggcccttcccatcaacgttccaacccccttcaacttggttggcagcagtcgcgccgccccacaaaaagttctttggaaagccagttggcattgtttttgaatacataattgaaaactccctttaattagtttaattgtaataatggttcagttgcattaacttccgtagcagctggaaaagccagtttaacgtcatgatagttcttagaattagtcacaaccattggcgttgtaacgggataccctgccgccttaatcgcttcaatatcaaacttcactagcggctgaccagctttgaccgtctcgcccttttgaactagcgtttcaaaacctttgccctctaattcgacagtatccattccaatatgcatcaagatttcagcaccatctgttgtgtttaaaccaacggcatgtccagttgggaacacgagtgctacttcgccgtcagctggagcgtataagacaccatcagttggttcgattgcaacacctttgcccattgcacctgatgagaagacctcatccttaacttcacttagtgggatgatttggcccgtttcggggctacttaacttagtggccacattgtaagtgacgtttggttctactttagttgctgcaccagttggtgtcgtttctactgaaacaccaccggccatgactggatcagccgttgccgcagtttctacgaccttagtttgcttgtcattactatcaacactcttgtaaccaaataacatttgtagggcaaaaccaaggactgcagcaatggccatcgcaataattaagccatatacagagccgtctaccccagttttagaattaatcgcagctgggattgagaataatcccataccgcccatcatatacatttttgtacctgcaaaaccaataataccgccaccaattgaagcggccacacaactcagaataaatgggcgcttacgtggcaatgttaacccataaatggcaggctccgtaacaccgaaaataccggagataaaggctggtaaagcaataccgcgtgtcttttgatttttcgtttgtaatagaatgcctaatacaactccagtttgggcaaacgaagcggctaatgataatcctaaaatagggtcaaagccttgtgaggctaggttggccatcataacagctacgaacccccagtgaacaccaaagataacgaaaacttgccagaaagcacccatcacaagcccagcaacgatcggactgaagttatagattgcaacacatactgttgaaataccatcacttaaccaacttgcaactggtccaataattaaaaaggtaatcggcactgcaattaataacgtaataaatgggactaagaacgtcttaactaccgttggcacgattcgttttgcaaatgcctgaactttagatgcaaaccaaacggccaagataattggaattactgaagaagtatagctcatcatcacaaccggaatacctaagaaagtcgcgtgaatctgtgattcaaagatactaccactgaacaacgtgcttaatactgtcttactgctgttcaaagcgacaatacttggatagcaaagcgccatcccaatcgccattccgacaaattgatcaacatgaaactttttggctgctgtcaatcccaaaacaattggtaggaaatagaagaaaccatcaccgatcgagtagagaatcttgtatgttcctgaattctctgacaaccaattgaacgcgacaaacatcgcaacgaaccctttgatcatcccagccgcacataaaacacctaacatcggcgtaaaaataccagaaatcaaatcgatgaaccggtcaaagatactcatcttttccccgtcttcataatcatcaggtacactaccaccatcggcaaaaccaccgacgcgaatgagcgtttcataaacgtctgcaacttcatttccaatgactacttggtactgaccaccggactgaacaactgtaataacaccatctgtatcttttaattcatcagtatgggtagcgttttcatctttgagcttaaaccgcaaccgggttgtgcagtgaaccacgctcttaacattatccttaccgccaactccggcgataatctttttacttaaatcttcataagccatcattgttcctcctcatttatctataaatcaataattgcaatttgagtaaacaaaaacccaaatgtcctttcttcaaaccacgccactagggccctagtgactgctgctctcaagaaaagatatttgggttaatgcctgcataaccagtaacacaccgttaataatcttatttattcacttttttgtcggtgggtgacgcgccagatgtgaagggtcaaatagactttgtcatccggctctagtcgccagccagccttactttgtaaaaatgtatcgatccgttccactgttgcataggcatgcgcatattttacttgcatcaactgcagtaatgactgatctaattcactgccagttccattactgcggctaacgcgttgcaccattagcgcacgtaaatgcgcaatgaaacgattgtaattgaaggactctgggtccagatgcatctggtattgatattgcacgatatcaatgatgccactgatcaatttcgtgattttaatcgtttcctgcaacttggaaccatctgaaccagcattgatgaaatgataagtcataaaaaccacttcacttttaggaaggatcacgtccgccgtcacattaattaaatcgaccgcttgactggctgcgtgaaactccttaggaaacaattttttaacttcccaacggactgtgccgttatcgacatcgattccatcattggctcgcttcaacgcaaagtcaatgtggtctgcaagcacaaagtactgataatcactaaaactgaccttcaacagcggctccactaggtgaaccacctttgttgtaatcacaaacgattggggttttaaatcttgaaaagcgtcaatatcaacattctgtttcaaagttgccacaaaacgccgctgaattttctgatcatcaatctgatcaccctgatgcttaccaaaacctacgccattaccaattacaatccattcaacatcctgatcgtccaccactaaagcggcattattattgaagttctttagaaatttcaccactcacgcctcctggattttcaaacaaaaaacctacttaaagagtatcacatctcactgaagagactgtgaatacagatatgagtaggtttatgcctgatcgaatcagtaacacgctttaatttatgttatttatactagcaacaattgtaagcggtgtcaaccgcatgtgaatatttttttgtcatacttccatctggtcaattcgctataatccttcatcattcgctacgggcaccttgcaatacatcatattcttttccagccactaccactactaacggtaagccagtgacaagcttaacttgcgttttatcttgatatagttgaacttctagcactcgaccacgaaaacgcaaccgataactaagatgcgttatctgagttggtaaatgattggtaatgtgtaacttaccgtcagcgacatacatcccagcaaatccatacgttaatcccaaccaactgccgcccagatttgcttcatgaagcccatctttggcattgccttgtagatcaaccaaatccattaacgatgtatccatataataactgaacgccttatcatgatcacctagtcggctcgccaaaatactgaaaatcgatcgtgataaagaggaatcatgcgtcgtaattggttcatagtactcgtaatctcgccgcaattgttccagtgattgatcttctggaaacaacatttccgctaataacgtatctgcctgcttgttgacccggtgacgataaatcatgagcgggtgataatgtaacaacaatggatattgcgttgccgccgtcgtcgcaaaaggccataccggcatctttggtgaattatcatcttgtgcagtgacttgttgttcttgatcatacggtaggtacatgttcgtacttgcctttgtgaactgtgcttgctcatcagcatcgccgtcaatataatgattttcaagtaaccaagctgcaaaagccatattttccttagccatccgattcgtgtagtaattattatctaccaaggcggtatattcatccggccccgtcaccttgtataagcagaattgcgaccggccatcacgctgttgccagctaccaaactgcaaccagaaacgtgcggtttccaggacaactgctgcaccttgttctcgcaagaagttctgatcattagtgacatcaaaatataacttaaccgtatgcgcaatgtccgcattgatgtgatattgcgcagtgccagcaggaaaataggcacttgcttcttcaccattaatcgttcgccatgcgtacaatgcgccccgtgtcacacccaagctccgcgcccgctctcgagcttgcggcaagatactaaaccgataatgtaacagttgcttggcaatttgtggctgcgtataaatgaagaacggtaacatatacatctcggtatcccagaaataatggccctcatagcccggtccagtaatccctttagctgcaatgttcgttaacccgttacgaccagctgattgaaataactggaacaagttatattgaatcccagtttgtaactttttatcactaatttgcacttgcgactgttgccaaaagtccgttaaaatctgccgattacgagccacaatatcgttggtccaacccgttatcttatccggcagcgcttgattaatttcactgatttgacgcgtaaacgaccagctcagcgttgtctgtgcttcgatggtaccactgccatgaaaaccggcatgatcgccatatacttcaaagcctgtcggaaagctggtcaaccaatcccgttgcgttatttgttggtgtgttgaagctaccaacgtctgccactctatttgctgctgacgatcagctggtataaattggttggttaacccagattgtcgttgcgccactcgcggatcgtccgcgtccgccgtcgtcgcagttacatcatgaataatcggccgcgtgaaccgcaacgtccccgtataatcaagcgaagtcagttcgtagttcaagaatagttgatgcgaattatccaacgcaatcattgatttaacgaccagttcaaaatgatggtggtcggaggtaacaatctgaaacttttccgttagtacgcccgtatcaaaatcaagcacggcatcgtcgaccgtcatatcccagtcaccaggaatctcagaacttgtcttctcagttgcaaagtctaagtaccgcgggcttgttaatgaaataatcgtttgatgatttttcgcatatccataggcactttctccatatgtgattggattcgtcgcataatagccattgatgagcatcactggtagtgttgcttgttgattacctgtaaacggtactgagtcccgaacacccatgtgaccatcacccaaggcaaaaatcgtctccagatactgccgattcgtcgttgccacatcttttaatgttaacttatcaatttgcatagtctcccccactttcgacttcatttgctgtagtatagcatccgaaataaagcggtttcatcgatttgagaatcactttgctgcttttcgcataaaacaatcgcttagtaccgacaatatactaacgttaatgagaacgtatttaaagtgacggaataatctcgttgtaaccaaaaagcttcgctgacctgacaatcaagttctcgattatcaggtcagcgaagctgaaattatttctcagtacgctttatatagttgcaacactctcacgttcaaccaatgtgactgggactaaccgcgtggcagatttgccaaccaaacaattaacactttcaataccaatctggacaaaattctgggtaacacttgtcaacgcaggagtcgcaatatcgcagatgagcgttccatcaatgctgacaacagaaagcgccccaggtagcttcacattactctcctgagcagccttttgtagtccggccgccgtcatatcactagctgcaacaaccccagtaatgcccagctcttgataagcattaaaaacattataaccagcctgataactataatctccgggttgcacccattcagcttgcccatgaatcgaataattttttaacgccgcttgatacccagcaagccgttgactacctgtatgataatggtcgattccggctaggccaattgtccgatgaccatgcgaaattaaatactttgtcgccaaataggccgcctgataattgtcagagctaacggatttgacgcgttcatctgctagattgatcgaaacaaaacaaaacggtgtctttgattctgttaataattgtaagtctgctttatctggttcaatcgccattaacaaaatacctgaaacagtacgttccaaggcggtcacaattgcttgatgttgtaactcggtattccgattaccagcatatagaataataacctgtaacccgatctcagtcgcgcgctgttgaataccatcaataattccacttgaaaaattcgtcggcgtgacgttgacaataacggcaatcacgtccgtcttctttttaaccaattccatggctagtgtattcttccgatagccgagatccttagcaacttttaaaatacgctcctgagtcttgtcgctatatgtaccctgttttttcgccaacactcgtgacactgtagcaattgaaaagccagttttagcggcaatatctttgattgttggcttcatttttccagctcccctccgatttaaattaattatagcgctaaaagccggtaaaatcattgtcaaaagcgtaaacgtttactttattattaaatcggtattgtaaacgtttacgtcaagtgctagtattgccctgttgaaaagtgattaacttttaaggagatggattctcatgaaccaacctgcagtacacccgaataaaccaatcgctgatgtttccagtaagcctaagacatccactattgctaattcgctgcccaatctcccattaaaaaccatctttgcaattacctttggtttttgtggggttaatatggccttctcattacaatcatcacagatgagtcggattttccaaaccattggcgctgatccgaccaaactaggactcttcttcattctgccaccattggctggattattcgtccaaccactagtcggtaaatactctgatcgaacttggacgcgctttggtcgtagaatgccctacttactattcagcgcaccattagcggcgttggtcatggtgttattaccaaatgctggttcattcggctttggctacgcttcaactgctgcattactatttggtgctattgctattttatttatggatttatcaagtaatgtttgcatgcaaccattccgcatgattattggagatatggttaatgaaaatcagaaggacaaagcatggtcttggcaacaagctttcagtaacctaggaggcgtacttgctactattctaccgttcgtcctaacttactttggtgttgcaaacacggcgcaaaaaggcgttgtccctctttctgtaagaattgcgttttatattggtgccattattttattaggcatctcagcatatactattcatacggttaaggaatatgatcctgacacgtacgcactttatcatcatatcgatcctgaacaacataagcacaccaaacctatttggcaattagtaaaagaagccccgaaagctttctgggaagttgccctcgttcaactatttgcctggattggtattcaatatatgtggacttatactactggtgctatcgccgaaaacgtttggcacacaactaatgctgcttcggctggctatcaagctgccggtaattggtatggaatcttgaccttcattcaatcaatggccgccgttctatatggtttcttagttctttcacggactaatccatacaagcgaaagttttggtatcgctttggcttagctagcttcgcagttggcctcgtttgggtattcttcattcacaaccagtacctattaattgccccattctgtttaatcggtatcggcttctttacggtgcatgtcgagccctttaatatctttacttcttcactagatggtgccaatgaaggctcatatattggaatttttaacggtacgatttgcttgccacaaattctcgcatccgttgccagctttatggtctttaaattcgttggtaattcgatgcctggaatgatgcttattgctggtatctcaatgttcatcgcagtacttgccattagtattattaagcaagacaagcctcaagaagatttgtcagagaatccaactaaataaaagtcattttactaaggagtgttttttaatatgagtgcattaccaagttacacacagaacggccaaacgatcacgtttgctttcgcccaaccattacaattaactattgttacgtcggaaatcatccgcgtctttattaatcgcggtgagcaaggtgaatcctatgcaattgagggtcataaaattcaggcgactgatttcactattgaaagtgctggtgatcattacattatccggacatcagctttaacgattcacctcgattccgaacggcatcttgatacctttgataaagatggcaatgccttgattaccgattatcgtggcgaacgcattcacttgaaaggcgtcgacaaagtccatgaacgattagttgaggcagaaggccattcagtgactaaggcacctactaaatctgatcaaggttactacgaaatcattaaatcgctagcacctgatgaatatctttatggacttggtgacaagaccggatatctgaacaaacgtggttttgcctatgataattggaacgttgataaccccgctccccagctggagatcctacctaatatttacaagtcaatcccagtgatgttggggctaaaaaatggacatccttacggtatcttcttcgacaatacctaccagagccatttagatatgggtaaggaaagcaaccattactacttttattcagctgtccaaggtaacctcgactactacattattggtggtaccacgttaaaagacattgtcaccaattacacctacttaactggtcgaacgccactacctcaaaagtggacgctcggttaccaacaatcacggtggggttacagtgctagtcaagaagaagtgcaagcaattgcagataaccttgcaaagtacgacttaccatgcgatgcgattcactttgacgtcgattacatggatggttatcgggtcttcacctgggacaaggataaataccagggtaatcccaagaagtttattaccaagttgaaccaacagggtctcaaggtcatcccaatcatcgatcccggtgttaaacaagattctgactatcacatttatgccgagggtcttaaaaaaggctatttcgttaaatctgctgacggtgatgtctatattaacaaagtatggccaggtaacgctgcttttccagacttcggtcgtccagaagttcgtcagtggtgggctaacaacggtaaatttttaactgatttaggtgtcgctggtatttggatcgatatgaacgaacccgctacgttcgaaggtccgattccagatgacgtggtctttaatgatcaagacacgccttcaacacataagaagatgcataacgtttatggccataatatggctaaagcaacctatgctggactaaaagagcaaactggcaaccgaccatttgtcatcacacgggcagcttacgccggaactcagaaatactcgactgtttggaccggtgacaaccgcagtatgtggccacatatccaaatgatgatcccacaactctgcaatctaggattaagtggctttagttttactggaactgacattggtggctttgcctcagacacgacatctgaattactgacacggtggattgaaggggcaattttcagtccactgttacggaaccatgcagcattagggactcgccaacaagaaccatgggcatttggcgagccaacgttaaacatttatcgcaagtatctcaaattgcgttatcgtctgattccttatctatacgatttatttgctaaggaaaccaaaactggcttaccaatcatgcgtcccgttgtcttaaactacgatcaggaccctcgtgtacgcgacttgaatgacgaatacatggttggtgacgacatactagttgcccccgttgttcaaaaatctcaatttaagcggttagtttatttaccagctgggaactgggttgatttttggaacggtgctgagtatgccggtaatcaggatattgtagtcgataccccactcgataaactaccattatttgtaaaacaaaacaccattttgccatggggacccgctgttagccacattagcgatgaaccgttgaaagcgatgacgtttagagtatttggtactcaagggacctaccaacactatcaagataatggacgtgactttaagtatcagtcaggtgaatggaacaattacacaattaccgttgatcataacaaggttaatgtgcaactcactcatcacggttatcaaccagtttatcagcagatcacagttgaattgtctgatcatgttgttaaactcacttacgataatgacagtagctgttatcgagaatagtagcttaatattttaatccttaactttaataaacaccttaggataccaatcactcctaaggtgtttattatttcaattactattggatatattaacgtgctcttttcctaaataaacttgtcattaatatcttaatgtctatccagtcgctcaaattaatccccttattcaaaacatgatcatataaaatttggtaaaaatgtattttagtaggtgtttcaagcatctcataactattatgttttctatcaattaaacccaacttaccatcgagcttaacatgataacttatatcatctagtgtcatattaacagcaatgccagccattggaacttactctgaaaacagtgatacataaaagaggaaatcaactgattaacaaactgattaacaaactgatttcctcttttaaataattttaactattacagtagtggcttttagttaactgcatagtactgtgcttctgatcgtaatggataagaaattaattcagtcgtatccaagtgctcatggcttaaattgacactgttaatttgactattgttataagttctatagtaataaactcccttgtccatatcacaacaagaagaatagattgtatattcgtactttcctttagtgacttcacaaagccctttttgttgttctacagaccctagtatatggaaaaactgactaacactgccagtctctgtctgcatcggcaacgagtttaatttagtaaaagcggctctaacaaatctagacattgaggacaagtctccaggtaatcctagtccgcccattcctctactataactatctaaatccactttttctgaaaaactattttggggcgtgctatttgataacgcacgatagttgttcaaattaaataattggtagtcaaaattaggattgtttgttaacacacctactggattgtcgtaaatttttagtccttctttaacactttcaataactatcgattcctgtttatcagcaaccaaccaatgtagcggtgataatggtaattgttcactaaaattaatattaatcaagtttagtttttgtatgttctttttcacttctctaacacttgaaaattgtcccaataaccaaggaattaattcaaatggtgtgatattaactttatcagcatcatattttttataatcagcataacctgcaaaattcaatcccgcaatacacaatcctttttcattcatcgcatcgtagtaaagtgggtagctttctacatcagcagtaattccaattattgcataatggtgatctaagttctccaccttacgaaatactagtggatattttctaggcgtaatcgtaaccatttcattgtatgaaatttcataatcgaaatttctaccgaagtaattattataagattgataagttatggcagtacacataactagtaatcctcctcgaaaataatatttagatttgataagccaataagcttacatctttttagtataatatcattgctgaaaaaataaagtttttttcatgaaatcatctctaaaataatttaatctattccaaacactttaagagtcaataatcaattgtaacccttatagccgatataacaatgctgttatacctacttatccttatctcgtgattgcttcaatagcctttgcaaccccatcatgttcattatcgacagttatttcatcagccacttgcttcacttcaggaatagcgttgcccatcgctactccatgtcctgcaaacttaatcatgctcaaatcattagcttcatcaccaattgccatcacgttggcagcagtcaaacttaacttttcacagagtacttgcaaagcgttgcccttactaacaccattagtgttggcctcgtaataaaatggtgcacttttcgtgaaagtaacctgctttttcaacggttcaaatagtttttgctgtttaatggcggcgtctaaaacttcaggttcatcaacatacatcgatttaatcagtttaatattccgcatctcttctggcgtccgatatgagatacccattgaaacgagattagcttcatagagtgtataatcaccaatattacggtcggccgtatacagccgatcctcagataccgcgtgaaaatgcaagcgtaacttacgtgctagggcttccaagtcaatataatcttcataactaatcggtcgttcatcaatcagttcgccactagttgtgtaggttgcagcaccgccaaaacaaacaacgtattgatcatcttgagcatcgagttccaactcctgcaacaatgctttaacacctgttaatggccgtcccgtgcagataaccactttaatcttcttttccttcgccattttaatcgcttgcttgactcgcaatgtcacctgcttttttgaattaactagtgtgccatcgatatcaatcgcaatcatcttaatattttccatcatagccatcctcattctttatcgaacacgaaatagaaaccgagcaacgccccgtttctatttcttcaataattattttaatttcagataagtattcacaacattagttacattaaagccatacttatcaagtaccaagtcaccaggtgccgaagtgccgaagcgatccacaccgatcttagcaccatgatcgccagcatactgatcccagccaaatgttgatccagcttcaattgtcacccttcttgtgaccgcgctcggaagcacactagcgcgatattctggtgattgttgcgcaaaccgatcaaaactcggaattgaaacgaccgcgacatcttgattatgctttgctaactgggctttggcctccaatgctaagttaacttcagaaccagtcgcaattagtaaaccatctggtatttctttttgagcagcactgaccacatagccacccttttcaacgccagcaaaggccgtatcaactgatacaggtaaagtcttcaaggcttgtcgactcaataccagaacggttggtttatcagttgttttcagtgcttgctcccacgcagctgaagtctcattaccatcagctggccgaatcacttgtacgttcggcatgcatcgtaaactagctaattgttcaatcggttcgtgggtcggcccatcctcgccgaccgcaattgaatcatgcgttaagacgtagataaccggtgcgtgttgcagtgcggacaaccggactgccgcacgtaagtaatcagtgaagacaaagaatgttcccccgaatacccgagtgccgccatgtaatacaattccgttcatcgcagccgccatgccaaattcacgtacgccgaaccaaatattacgaccatcgtaggattctggttgaaagtctgatgtttccgcaatcattgttttgttcgaactcgacaaatcggctgcgccaccccataagctaggtattactttggcagcagtgttaatcgccttagcgcttgccgcccgactagccaatgcatctgttaattgatagtgtggtaaagtagatttcaagtcatcagaaaattgtccgttgaacgcttgcttaaaagactgcgcctgatctggatacttcgcctcatattcttcaaatagccgtttccattgctgctcagcacgcgcaccattttcctgaatagttacttcaaaccggtctgaaacagctaacggcacttcaaaatccgagtaattccagccatatactttttcagctgctttaatgccatccgcaccaattgggttaccatgaacagcattagtcccttgtttaggtgcgccataaccaatcaccgttttcacttcaatcaaagaaggacgatcagttgtcttttttgcaagttcgattgccgcgtcaattgcatcaagatcattcccatcttcaaccaccagatgctgccagccataagcagtgaacctgtcaccaacattttcagtaaacgcttgcgacgtcttaccatctaatgaaatgccgttcgaatcgtaaagtgcaattaactttcccagcttaagatgcccagctagtgagccagcttcgtgcgaaattccttccattaagtcgccatcaccgacaattgtataagtgtaatgatcaacaattggaaaattaggtcggttatattgggcagctagatgtgcctccgccattgccattccaacggccataccgaatccttgtcccaacggaccagtagttacttcaacgccatcggtatgtccatactctggatgccccggagtccgactgtcccactgccgaaaatgcttgagatcatcaatcgaaacatcatacccggctaaatgtaacaggctatataacatagctgaaccatgccccgcagatagaataaatcgatcacgattgacccaattcatgtgagtcttgggattaatatttaaatgcttcgtccatagtacgtaagccattggtgcagctcccattggtagtcctggatgccccgagttagctttctgaatcgcttcaatactaagtgtacgaatcgtgttaacacctaattcatcaactttatcaaacattccacttacctcctaagccgtcattgcaactatttctgtgccgcctgaaatgctttccaatccgaagcaaaactggctaagcccttatcagtcagtggatgagaccataatttaccgaatactgtggccggaattgtggcaatatcagcaccagccaacgcagcttcttgaacatgttgtggccctcgaacactggcagcgataatttccgtcttgaatccataagtatctaaaacttggcgcaaatccttaactagctgaattccactgccaccaatatcatcaagacgtcctaagaatggtgaaatataagtagcaccagcctttgccgctaataagccttgcgaaactgagaatacaagggtcacattcgtcttaattccttcttcactcagcaccttgactgcttttaagccttcttccgtcatcggaatcttcaccacaatatttgaagcccacttaacttcgttacgagcctgggcaatcatctcttcggccttggttgccgttacctcagcggacactggacctgatacaatctgcgtaatttctttgataacggtttcaaaatcacgaccttcacgtgacaccaacgttggatttgttgttaccccatctactaaaccaagttccgcgaaatgtttaatatcttcagtattcgcagtatctaagaaaaatttcatgattagatttatctcctttattattagttttcataaattattgaaagtagtactcataattactgattacttagttccatcagtcatacgtttagcacgccgggtaagaaaaatactgcaaagaatcacaataattgtaaacaagataattcctgtaataactgctacacttccgtaactccctaattttcctaacaagattcctggaaccaaatagtcggtatctgcaaacgttgaagctgctaatttcaagcttcccaaaactggtaaaataaacaatggcaaccaactaatcaacaaactatttactgtagcgccaatgattgcaccacgccgaccaccagtagaattaccataaattgctgctgcagcaccacagaagaagtgccccactacacctggaataataacagtagttcctagcgcaatcatgataaacatacttagcgtcccaacaatgaaactgacaaagaatcctaataaaactgcatttggtgcgtatgggaaaataattggaacgtctaatgcaggcttagaattaggaaccaacttggtcgcaataccttgaaaagctggcacaatttcggccaaaatcatccgaacaccttgtaaaacaaccacgaaaccggcagcaaatgttcctgcttgtactaatgcataaacaatataattagtcccaccactcaatttcgattcaatgtaagctggacctgtcacaatcgccaaaataatgtagacaatactcatcaaaatcgtaattgaaactgtcgaatcacgcagaaagcccaaactcttagggatttctagatcctctgtagacttttctgcattaccaaaccatttacccatcaatcctgagagcgcatagccaatgttacccgtgtgtcccatagcaacatcatcgccacccgtgattttacgcataaatggttgtgtcaatgctggtgttaccgttaataatgtcccttcaaatagaccaccaagtacaatcgtttgccaacccgtgccaatgttagcgcttaccaatataactgcagttaaacaagaaacatataacattgcttgccctgtcaagaagatatacttaaagcgagtaaaacgagctaataaaatattaacaatcatcccaactaacataattagtgctgttgttgagccgtatttaaccagggcaattgcaacaactgcttcattactaggaacaactccttgcacatgtaacgcaaacttaaacatggaagcaaagggtgacaatgcattttgaagaattccggcaccaccagttaagactaagaaaccggcaaaggtcttaatagttccttgaacaacttccgtacttttctttttttgaagtagtagccctaacatcgcaattagcgctactaaaatagacggttgggtcacaataccaacaaataagttcaaaacagtcttcatgtgattctcctccttttcagcggctaatcatgttcaatattttcttgattcagaattgtattgacatggttccggacttcttgcttatcaatcaagctttttagtaacacaaccttattctcaggaatacttcctaatgcactttgaagcgttgattcaacaaagaagtaatctgctgaatcagcgccaacgctcccaacatcagaatgatccacttggatatcttctttaacattctcgtcctttaaaatactctgaatgttcatctgaaccataaaactacttcccagaccactttgacatacagctaaaaatttcataatagtaccctcctatttttgtaattcttgctcatgtgcaataacttctaaaatatcaacttcactagttgcatttaacatagctgtcaccgccgactcatcggttaacaactccattaactctttaataacggctaaatggctgttattatctaccgcggccaatacgaaccataaattgatggggtgttcatcattaactagactaatgctatgatttgtttttaagatagataatccgatttcatggacgttacccgctggtctagaatgtgcgagtgcgatttgtggtccgatattgatgtacgggccttctgattccaccacattgagcatttccttgatgtatccatcttcaatcgtcttattattaatcaatggttccgcagctaattcaattgcttgcttccaatctagccctgtgccttctgatacttgcacagtctttttattcaataaatccaacagcatttttattcatcctcctttcttgatatcgctatttatctgacaatgaccagtataaacttgaataatagcgccacaagtgcaacaatgtttttgagaatagtgcaactttggcactttggtaccttaatgctttaattttttagtagacttaatacagggaggatactgaattgcgtgtaaatttcagcaaacgaaaacatggtaatgaattattagaaattctattgacgtcatcgggctacaccacagctaacttcttacaacaacatctacatatctcacgtcgtagcctattctatctaataaataaagtaaacgatgagcttgatcagcatgcagaatttccgattactaatgttaaaaaactaggatattaccttccaactgacacgatcaaatttctgcataaaatgacagaaaaagaaacttctagcaagatcatgaccaacaatgctaagcaacgccaactactaattgcatttagtatcctcaacactagtggttgctcgttagcggacctaacttaccaatttaatatttctaagaacacagttattagagatatcaaagtactacactcacaactagcgctatatcatttacaaatcaccaatacagaatccggtaaaataatcacgggttccccgacagcagttcgcaaatgggtgtacgatcatgctactcaactgaagacactcattgaacaaactaggcgggctaccattaagcccactaccataaacgaccagattaaactctttgaaagaataactggaaaatatttaaccgacgatgcaagtatcacaattcgactatttttatattggtacttaactaacattagagactgtaataaccaactaagtgatgttatatccgcacaaactgacttaacactggatcacatttgggctaaaagttttttgaacgattatcatatcgataactctaatgaggttgactacttagtcaagttgatcaattctagtcaatttgctcatgtcaattggaatgacgacttgattcaaaagttaaaaccattctcagttcgaatgatttctagttttaaccacctctccggcgcacatgtttcaatcaagtcgattagtgacagtttaacggttcacttgctttcaacctactatcgtgctcaatataatatgccatttgaataccctgacttaaaaagtattcaacagcattatcaccacacttttgaaatcactcgtaaagttgtcgtaccatttgaacaatatattcatcacacactttctgatgatgaaatcgcattaattgccatttactttggtggtgctattcgtgagcaaaaaacaagcaccccaacacaaaatgaagtacttgtcgtttgttctagtggcatcggtaccagtcgtctattacttcaacaactagaaagccgttaccgcggtattcatttttctagtccaatgaatgtgcttcaatacgaaaattcagatctaagtaatgttcagcttgtcatcagtacaatcaaattgaacacccagcgcaacataccaataactaccgtatctgcttttccttccgagttggagtggaagatcatcgataatgctattattaaggctgggttggcaacttctgacacactcaagttatttaatgtggatacactattggatattgtaggcaactacgctatgataagaaatcctatgggtctgaaactcgcactcaacgactatttgacccagctaactcaggaaccactattagccgcaccccaagaaaatttatcagaattaatcaaactactgccgccagaacatgttggttttctaaatcatcaaaaatcttggaagcaggcggtgcgtacagcactgtcccccctacttgaagactatagtgttgaaaaaaattatatcgatcagatcattcatttaactgaaagtaacggaccatacatggttattgggtcaggcgttatgttggcgcacgctgctccacgtgatggcgttaataatctcggtgctactttctttttacttgataagccgctacctgttatgacaaatcaaaaaatggtccatgtaattattggtctagcccccatagattacgagaagcatctatcatttatcagtgacttgatgacacaattacaacaaaaggattggttaactaatctgtatcatttgaataataaaagggacttattcagatatttgtataaagataactagctcgtcttcatttcatttattaatgtatctaaaagcagaagccaagaaacgaaagttgctatcttggcctctgcttttagagttaaaaaggattttttattattaaataatgcgctctttccagtctaatctcatttacttactgaactattccaacgatatcattcggggtcttagcttgatatttcgcattattaaaatcgacattcggtaatgctccccatttagcaactacaaaatcaacgcctgcattctttgaagcctgcatatcaaagatactatcaccaacatacaacgtcctttcacgtgctaagttaaatctctctaatgtgtaggtaatcggctctccacttggctttggatttttagttaaatcagcagtagtcacaattggcatctttgcgataatcggaaaatgactgacttctttatcaaattgaacacgatccttagatgtaaccactcccactgtgagattcattgccaataaatcatctaacatttgttcaactcccacaaaatacgttagttcattcatattctcgttaaattcaattagatatctggctaatacattctgccaattttgaacaccaaattctctcaggatcatctcaccgggctggccaattctcttacgatattcttcaattggcatatcaacaccctcgcgaactgccccctccttcaataacttagcaattaagtccgctgaattaatcaaggtattatcaatatcgaacaagatattttgatacttcataaagaaccccccctgctcccaaaaaagagcactaagacaaatatctcagcgctctaaattaaggaggttataattttaatattctgtcattcaactacaattagtttagtctgctaaatctggatcatcaggattagaggcaatcataactttgagctctttaccggccatcattgcatcaaaagcgtcacgccagtgttcaagatcaaagaccttcgtaatcattgcatcttggttaatagcacccttgctttcaagatgtaaagcaatcgcccaatcatacggattttgtgaccgtgagccacgatacgtaatttcatgctgaataattgaacgttcatctaattcattcatcggctttgcaaaaagaccaacctgttggaaagttccacccttacggatcaatggtaatgcagagttaaccgctggcgttgcacctgaacagtcataaaccttggtaacgccaacgccatctgtcgcatccatcacgaccttggccaagtcttctttttgggtatctacaataatgtcagcacctaactctttagcaatttgtaaacgatcagcatccttagtgatcccagaaacaataacaaaggcaccaatttctttggcaatctgcaatgagagtagccccattggtcctggtcccataattaataaagtgtcgtgtaacgtgaatggtgtcttttgatacatagcatgaacacaagatgctaaaggttccgacattgcagccatcttgtaggaaacgttatctggtaaaatgtgagcactttcctcacgagttagaacataatttgccattgaaccattagctttagttccgattcctacacggttaggacataaattatattctttatcttggcagtaaacacatgtgccatccgttgcaaaagtcgtttcactagtcacccggtcgccaggctttagcgttttaacatctggtcccacttcaacaacttcacctgaaaattcatggcccaaaacaagtggtgtcaccgcattggcatactgacccttaaatgtatgaatatcagtaccgcagatcccagtgtaggccacttttaataaaactttgtctcctgttacttcagggattggaatttgcttcagttccatattgtcgtaaccagattccgtcttaacgacagcctccatagttttagcgccctttaattcgtcagttttagttgtttttacagtatccataatccattttcctttctacggataatcctttaattaaataatggttgtactaactgtgatagtttcaaaattaaccagttcaagatgttaccacccgtatccaagttagtgacctctgatgcgccctttggaaaggcaacaataccgtgcatcattgatgtcaacgttggcccaaagtcagttgccatcaacaatgcaaataccattacgatagtagcagagagtacagagtggacgatatttcctttacgactaggaacaatcaaggcagcaaagaatggaattgttgctaaatcaccgaatggcaatacccggttaccaggtaaaataatggctaagaataacgtaattggtaccattaatagtccagttgccaaagtagctggtgacccggttgaaagagcagcatccattcctaagtaaatcttccggttcccgtacttctcttgaagtaacttttgagcaccttcttgaattggaattaacccttccattaagatcttaaccatacgcggcattaagaacatcacaccacccatggacattccaagcttcaaaatgttcggtacgctgtaaccacctaaggctgctagtaacatcccaatgacaatccccatgaccatgggttcaccaaagaccccaaaccgtttttgaattgtttgtggatccacatcccattttctgattccaggaattttgctgacaacccatccaattggaataccaagtaggccataagccgcagcagaaccagttggaaagctaatgccatccaagccataaaactcagcgacctttggcgcagttttatcagcaataattaagacagcgatttcatagataatcccgcaaagaattgcaaaccaccagtttttcgtcaccacataagccgtagccgcggccgcaatcatatgccagtaattccaaatatcgatatcaagtgttttagtaagatttaacaaaattaagccaacgttaacgactaaaataattggaatcatgatagctgagatcggctgtgcccatgtcccagcagaaacggcaggccatccagcatcaataatcgttaaatgaaacccaaaccgtttaaccatcgcctgcgcagcaggaccaacactagttgtcaacaaattgatgactaggttaatcccaatcataccgataccaacagtaatcccagatgtgagtgccttacccggtttaaccctaaagattaacccaacaataaagataataatgggaagcataacgctggggccgacattaatgatgctttgtacaacatcagataatactttcataatgcatcctcctgcttaaaaccctagctcttaattattgtgcttgaatttcgcgtgctttagtcaagatttcatcctgcaatttatcaacaccaagaccagttaaaaagcccattgctttaatcgctggaatcttatattcagttggtagtacagttgttgaaatcaacatatccgcgtcatcctgcttagaagcagcttcagcaatcttaatttgaatcaaattagcgtcaatattattttcggcaaacaaatcttcaacttttttcataacaaccgttgaagtggcaattccggcaccgcaagctactaatacatttaattttttcataataatctctcctcgtatttcttctatttatcttttatttgcttaacaactgatgaatttggttaaagttctcggcattttccaatgaatttactaatgaatcatcttgaataattcccattaatgcttgcagcatctctaactgagcatgtggtttattcagaccaagcacaaaaactaattttgcatcaaccttttgctctggatcatccatccgactaaaagcaattggagcatcattaacaaccacggcaacaaattctttgttgattgtatccgcgtcagtatgtggaattgcaacacctcgatgttccagttgcaagccagttggaaaagttgattctcgcttgattattttcggtaaaaattgatcagttacaaacccattttcctgtgccttcgcgttaatcgctgtaaataattccttcgacgttttaaaagaggtgtgtagaaaaataagttggtctctcaaataatcacttacttcaacaaggttctcactcaaaataagtcgctcccttcgtattatataaatgtaatcgctttcaacagttcaaattgtatcattttgcaaatcttttgcaatacttttctttaaaaactttttaaagtgctctttgcaagcgatactttgcaaggcaatttacataaaaaacaccaaattattatattcacaaagtttatataatcagtatgttaagcgcttacaaatctgggacaaaattaattatttcattcactttactaaaaccagatgcaaataaatgcaaaatatatgatattattacaaatagaaaatacttttatattttagggaggttagcccgatggaagtcatgcaacgtcaaaaatatatcctagaccaactaaggcaacaaggaacaatcaaaatcacagatattagtaaagaaattagtgtctctcgcgaaactgttcgtaaagatatttacactttagataaacaggggctagtccaagccattcgtggcggggcaacaacgccacaaagcgtcaatgagaccaagtatggcaaacgacagcatgaagccgttgcggagaagaaagagattgctaccaatgcacttcgacttatccatgacggcgaatccattttcctagattatggcaccacggcatttcaagtcgctgaaaaaatcaaacatagtcaactaactaacttaacagttattactaactcgactttcgttttaaattcgttacagttcgttaaagacattcaattcgttctattaggcggcactatgcgaactagcgaagggtctctatcagggccaattacattagataacattgataatctctatgcagatatcggattttttggctgtggtggcgttgatctgcaagcaggcattaccaaccactacatcgaagaagttgaagtttcaaaaaaatgatgtcacattgtcggatgaaagttattttggctgatcataccaaattcgaaaaaaacgcactttataaaactacagacattagtaacgtggacgccattatcaccgatgaacaattagatagtcggcttgcgaaacaaattcggttggctgacatctcattgatcagcggtaaataaacaatagaaggacaaacagtcaagggtacttacataccgcttccctgtttgtcctttgatgttaaactgatagatttgccaaatattgcttgactttacaattgaaaccgctatcataataaccgtaatgataaataaaacaaatatttgcaaaggagttgcaaaataatgagtgaagcaattaaatccaaaacagttgattactcttctgatgaatatctaaaacgcgttgatgaatattggcgtgctgctaactacatctcagttggtcaactctatctactaaataacccgttacttcgggaaccactaaaggcgaccgacgtgaaagttcatccaatcggccattggggcacgattgctggtcaaaactttatttatgcccatttaaaccgggcaatcaataagtatggcttgaacatgttctacattgaaggccctggtcatggtggtcaagtaatggtttctaactcctacttagatggcacctatacggaaacgtatcctaaaatcacccaagacaaagctgggatgaaacgcttattcaagcaattctcattcccaggcggggttgcttcccatgccgatcctaagacgcctggttcgatccatgaaggtggcgaacttggctactcaatcctgcatggtgctggtgcagtattagataatccaggtttaattgccgctaccgttgttggtgatggtgaatctgaaactgggccattggcaacttcttggcaagttaacaagttccttaacccaattacagacgggacagtcttaccaatcttgaacttaaacggcttcaagatttctaatccaacagttctttcacgtgaatcacatgaagaacttgaagactactttaaaggtctaggctgggatccacactttgttgaaggtacagaccctgccaagatgcacaaaattatggctgaagaattggataaagtcattgaagaaatccacgcaattcgtaagaacgccaaggataacaatgatgaatctcgtcctaagtggccaatgattgttttccgggcacctaagggctggaccggtcctaagagttgggacggcgaaccaattgaaggttcattccgggctcaccaaattccaattcctgtcgatcgcaatcacatggaacacgccgacaaattagttgactggctcaaatcatacaaaccagaagaattatttgatgaaaatggtactttaaaaccagaaattgccgcaatcatccctgaaggccaagctcgtatggctgctaaccccgttactaacggcggtaagttaactaaagacttaattacaccaaatatcgatgattatgctttggacaacaagagtcacggtaaggaagacggttcagacatgactgaacttggtaagtatatccgtgatttaattgagttgaacaaagacaacaagaacttccgtggctggggtcctgacgaaaccttatctaacaaactaggcgctgcttttgaagataccaaacgtcagtggatggaaccaatccacgaacctaatgatgctttgttagcacctcaaggccggattattgactccatgttgtcagaacacatggatgaagggatgttggaagcttacaatttaaccggacgttacggtttcttcgcaagttatgaatcattcctgcgcgttgtggattcaatgttaacccaacacttcaagtggttacggaattctcacgaagaaaccccttggcgggctgatgtaccttcactgaatgtgattgcatcatcaacagccttccaacaagatcacaatggttactctcaccaagatccaggtatcatttcacacttggctgaaaagaagaccgaatacgttcgtgcctatcttccaggtgatgccaatactttgattgcaacctttgataaggctatccaaagcaaacaattgattaatttaatcattgccagcaagcaccctcgtccacaatggttcacaatggacgaagctaagcgcttagttcgtgatggccttggtgttgttgattgggcaagcactgatcatggtgaagaacccgacgttgtcttcgcaactgccggctctgaaccaacgactgaaagcttagctgccgtatcaatcttgcatgcacgcttccctgaaatgaagattcgcttcattaacgttgttgatcttctgaagctgaagaaagacgaccctcgtggtttatcagatgctgaatttgatgctttcttcactaaggacaaaccagttatctttgcttatcatgcatacgacgacttagtaaagaccatcttcttcgatcgccataaccataacttacacgttcatggttaccgcgaagaaggcgacattacaacgccattcgacatgcgtgttcgcaacgaactcgatcgtttccacttagtcaaagctgccttattagcaacgccagcttatgccgaaaaaggtgcccatgtcattcaagagatgaacagcattttagacaagcatcatgactatatccgtgctgaaggtaccgatattccagaagttgaaaactggaaatggactgcattgaagtagagttttaatcaataattcagcgtaaattaaaagcgactttcaaatgagaattcatttgaaagtcgctttttgcacattattagtattgcgggtaacgcttcataatatcaatttctttgcgattcagcgcatgatcagcacacaaaatgattgcagcgctttcagcattatgccgataatgctgactattcttaattgcaaatggcattgcacatcgattagctaatctgatatattgtcccaaaatctccatatcaagacgaccattaaataatagttgataattacgtttctttttcataaccttctcaagaatcgtcgtccaatcataacgcattgcttcactaaacgttattttaagctcgatccgctcataaaaagtacctaagcagcgattttgttcatcaggctttagtaatggcagccctaaaactgcatttttgacacgagcgtcaatgtctaaatctttattttgcattttctcacctcaagaagataagcgactacactaaagatcacatttccaaattacacgttcaataataatcactaatccttctcataattcccgaatcacccgcgctggattaccaccaacaaccacgttatctccaaaggacttggtgaccacactccccgcagcaacaatcacattatttcccaatgtgacccctggacaaataatcgcgccaccgccaacccataaatcatctcctagattcacagacttaccaatacccatggcaccattgcgtcgtaactgagggtcatcaggatgattcacagaataaatttgtactttgggacctaatagacagtgttttccaatcttaatcggggccacatctaaaatcacgcagtcataattagcaaagaaatcttcaccaacgaataggttatacccgtaatcacaacgaaaggtagcatgaacttcaattttatcaccagtcgcgccaaataatcgtttaattatttgttggcttttatggggattcgtctcaccgagctgattgaaagcttctacttgttgccgtgctatggctcgctcaccgactagttctgggtcataaacattaaacaactcaccagcaatcattttggccttttcactcttaatcacactaatcactccacttctgattctgaataaaaatggttatggccacaataagtaaccacaaccattttgtgatattcactttactttaagaatgccttagtcatgccaaccatggttgcatagtcttccatttgttcttcagttaacgagaaggacagcatcgtgtggtgaccaccaccagcttgcatccattctagtgcacctttctttaagcccatctttggggtccataattgcttagcaactggtaaattaggtgtttcggcttctggcttattcgcatctaccgcgtagctaatcatcttgaacccatcacggaaatcggcaacggtgacatcaattgcttcaccttctgaaccagtaaatactaggcgagcaggatcatctttacccccaatatccaatggatgaacttcgacccgtggtttatcacttgcgatagacggatcaacttccaacatgtgtgaacctaagatcgcttcatgaccatgacgcaagtctaacgtgtagtcttccataaaggcggtttgcttgttgtgagacataatcttcataacccgtcctaaagcagccgtcttccagtcaccttcagcaccaaaaccatacccatcacgaattaataattgtgaagctagaccaggtaattgctccatcccccaaagatcttcaaagttcgtggtaaaggctgtgtaaccgcctctttctaagaaccgcttaatacccagatattgtgccaattgaacccgaactgaatgtttatacgtgtccgcatcgttatcaccttggaccatttcataccgagactccaagtcagcgtattccttatcaacatcagcatccgaaaccttattgatctcttcaactaagtcaccgataccataatagtcaactgtccagcccatcttaatttgagcctcaaccttgtcaccttcagtaacggccacattacgcattgtgtcgccaaagcgagcaaccttaactttaaagctctcattgtacgctacggcgacgtcttcccaacgtgcaatctgctcttgcacatcttcatcgccccaatagccgtaaacaatcttattatgtttctgcaaccgggcgttaatgtaggcatactcgcggtcgccatgggcactttggttaaggttcatgtaatcaaagtcaatgtctgcatatggaatattattcaaatattgcgttgctaagtgtaataatggtttttgtaacagttcagttccacgaatccagttcttagctggtgagaatgtgtgcatccaagtaataacaccggctaccttatcattgtaattaacttctttcataaagttggtgatactttcagccgtcgtcataacatccttaaagactactttataaggtaacttgccgcttgcattcaatttatccgcaatatcttgcgcatccttagcaacagacttcaattgttcttcaccataaaggtgttgtgaaccggtaacaaaccaaaactcataatcaggtactgataacataattaagcactcctcgtctatttgtatgttttttaattcaactaatccttattacttgcgaactgcatgatccttagaatgcgcattattttgaccataataggcacttgcaccatgcttacgtaaataatgcttatctaataaatattgtggtaattcgctacttgcacgggtcaattgcgcagtatgataatcttcttcggcaaccacttccaacactttagcattgtaaacggctttagctggcgttggtccccaagcaaatgggccgtgctggctgactaatgaggctggtacagcttcataatcgaggccccgttcttggaacgtcttcacaatggttttacccgtgttgccttcataatctgcttcaatttcttccttagtcagcgcatccgcggccggcacgtcaccatagaacgtatcagcatgggtcgtgttcatagctggcacatccatttgggcagctgcataggcaactgcccatggcgaatgagtatggacaattccgccaatattaggaaaagcgttatataacaccgtatgagtcggcgtatcactagacggatttagtttaccttcaaccacttcaccctgtaagttaacaacgactaaatcgcttggttttaattcaccataatcaacaccagatggcttgatcacgaataggcctttttcccggtcaatgcccgagacattgccccaggtaaaagtaaccaggcccagcttcggaagctgcatgttagcctcataaacttcttgttttaatgcttctagcattttattaaccctcttctctaatatttgattgcttgcccagccgctgcttcaactggtaagccagcttgataacgttgaataaattcacgatatccggccacccgttccggttctggactcaacgtcatactttctggctctttaaagacttcttgatctaagaaatcttctaggttcattgcagtttgccgacaagcaaagttggctaacactgccatcccccatgggccgccttcaccagcagtactcattacagtaatcggaatgttcagtgcgttggccaatacttgttggccaattaccggcgttcggaacaatccaccctgtgcaatcataacgtccgtttgaacatgttcttcgttaacaagaatatccataccaagttggaggggtgcgaacgccgcatataattgggtcaacataaagttcggtaaactaaatttactgtttggtgtccgtacaaatagcggccgaccagcttgaatcttagtaatattctcaccggattgataactataattagccaaccctccagcatccgcatcagcgcgagttgattccaagaataacgtttcatataatcgatccggtttcaattccattcccaaccgggctgcaaactcacgaaaaatcgttgcccacgcattaatatctgatgaacaattattaacatgcaccattgcaactggtgacccatctggcgtcataacaatatcaatatcgcgatagactttagacaatggtttatctagaacgttcatcgaaaatgctgaggttcccaccgagatgttacccgtgcgtttacggacgctgttcgtaccgaccattcctgttccagcatccccttctggcggtgcaataacactgccagtgtcgagcgtgccgctctgatcaagtaagctcgccccggcagccgttaactttccagcaatggctcccgctggtaaaacccgcggtaaaatatgctggatatcccatgaatacggtttaactttgtcaagttggctaaacttggttaacatcgtctgattgtatgtgtcagtcgtttcatcaattgggaaaacgccagacgcatcaccgattcctagaactttctcacccgacaatttccaggttacatagccagccagcgttgttatgaagtccacctgtttaacgtgcgcttcattatttaagattgcctggtataagtgcgcgatactccaccgttgtggaatgttgaaatcaaataattcggtcaattcatctgctgcttgccccgtaatgttattacgccaagtccgaaacggaactaataatttcgcttgttgatcaaatgctaggtatccgtgcatcatggcactaatgccaatagcattgatatgcttcaaactcatgtgatatttactgcggacatctgctgataattgcgtataactttgttgaattccggtccagacatcttcaagtgcgtaagtccaagtaccatcaacaaattggttttcccaaacgtaacttcccgaagcaatcgtattaaaatcgtccgtgatcaaaacggctttaattcgagttgagccaagctcaattcctaaagaaactttgccagttttaatcgcttgggctgtttcaactaaattcatctgacctgcctcctaattaatgactcgcttgttgtacgggtacttgtttgtgatgattcgttcctgctgcttcaatctcttcaagtgagtgaccacgagtttctggaacacagaatcgaacgaatagcactcctaatacacagatcacaccgaacaccgcaaaaactgcttcttgtgacattgaagccgtcataattgggaataataaccccacagcccatgacccaatccaattgaatgaagaagctaagcctgatgcccgaccgcgaactgcaagcggaaagacttcacccacgagcacccaagtcaatggtgcccaagtgaatgagtagaaagccacgtaaatcgataagaagacaacaatcatcattggacttgcatttggcaccaaactattaataacagctggtagcaggaatgataatgccatgacggaaccacccaacatcaataaagtccgccgattgaatttttcagcaatccaaatgtaaagtaatgatcctaaaactaataagatgccttgaacaattggccacattagtgctgaacttgcagcactaccggttgccttttcaacgattaacggaatgtagtaaaagattgcattagcaccttgaaattgttgaaaagctgcaaccccaacacctgccatgactaagtaccgatatttcccattgaacaaggtcgcccaggaggtcttttctaaattgttagcctccgtttgggctgttgattgaatcgctttaacttcactgtcaacttcatctggtttacgaacaaaagataaaacttgacgggcttcgtctaaccgattggctttaattaagaaccgtggggattccggcaacttcaagactcccagaaagagaataatcgctggaaccgctgccaatcctaacattagccgccatgacatattctcgggtagatccttcagaatataatcaacaatgtaagaaattaacatccccgacacaatcatggtctgattaatcccagataaactaccgcgcaatcgtgctggtgccatttcagacatatatgcaggtactagtgcagaagcagcacccacggctaaccccaagaagattcgcatgccaatcaaatagtaagttccgttgttaggtgaaaagccacacagaatcgagccaattgcaaaaatcaatgatgacatcaagatcatccgccgacgacctagtcgatccgccaactgaccggcaattgcagcaccaaaaattgcgccaaacattactgctgatgtcacccacccaaccaatgttgcattagtcaatgcccaatcggttttcagaaacggtaatgcgcctgtcattaccccaatgtcatacccaaagagaatgccaccaaacgaaccaaagaagaaaataaatttactggaaacctttttctgcttatccaaagttgttcctcctcatatctggacttgttaataattgcaaaccattttagaaagccctttcaaaaagagttgaattttaattaacaacgttattacgattcaccttttgataaaacgctttcattttcgaacaactacagtctaatatatttatacgtataaatcaacacaaaattgttttattagtacaaattatttatttctttttcgatttgtcacggctactggctgtttcaggcacaaaaaaactgtcctaatccgttttcgattaagacagttataagttcaatagggttaatttaagtctgctactgaagtgcgaacaatcagtttaggcgtatagacgatcgactctactggctgcttgtgcaacaaccgtagcatttgccgccccgtatcctcgcccatcgtcgtcttctcatgattcatcgtggtaattcctggactcatgtaccgtgacatatggtaatcatcaaagccaacaatggatatgtctgttggaatgtttaatcccttccctttgagataatccatcacccgaattgctagttggtcattgtaacaggcgattgctgttggtcgctcattattttgcagataagtatccagccgatgcgctaatttttcaaaaggatcaccagactgatacatcaaaatattactcttatatgaaatctcaggctgctcttgataagctttcacaaaaccattcatacgatgaaccccctgagcatcatccacctgaaaaatacccagaatgctctcatgacccatttcaaacaaatattcaatcatccgctgttcggcctcttgatcactggttgtgacggcttgaaagtccaaattaggataacttgcattaatgaataacacgggaataccattatccttaatttcctgatacaagtccatattaggattgtccaaagcactctgagttggttcaatgattagccccgcaaccttgctattgagcatattgatcaaatttttacgttcacgttgatgattattatgcgtattgccaagtagcaacgagtaaccaccctccgaaataacttgatcaatcccataaataatttgcggaaagatataatctgcaacatgtgtcgcaatcacaccaataattttactgtcatgttcactcgaccagtccttatgccaatcttgaacaaacattcccccgccttgaatacgataaatgaaatgctccgtttcaaggtctcctacagctcgtcgaatcgtatatcttgagacggcaaaacgtttcatcatttccgtctccgtaggtaattttgcatcaattgcatattctcccgaaagaatggcttctttcagggcatctttgactttttgatatttattttccatacactactccactcagtactacctatttatttattcaaactcaggtctgaatcttcatgttgctcttaaccaccgaaccaaagcgctaatattattgctatcattaagccaattatcccacgccatttcgtcagtcagcaattatatttgctattactattataacaaacacaattaatcatataattagttctgactctatcaattcagatactagcgctcctaatttattagcattaattttatatttataaattgtgctgataaataaacgtgctctggtcaatacacgctaattactagcggaattccaccactaaaagattagccttgtcatatacgtcccactcaatttatgataacgttatcataagtacaaataatacggggagagactatccaatgaaaaatacattcttaaatacagttaagggatcattaattatctcgtgtcaggcgttacccaatgaaccactgcatagttcatttattatgtcacgaatggcccttgccgctaaggaagctggggccgcgggtattcgcgctaattccgttgttgatattcaggccattcaagacgaagttgatctaccgctcattggtttaagcaaagtcgactatcccgactcacctgtttacatcacgccaacaatcaaagagatgcggggcgttgctgctacaggctgtgccgtagttgcctgcgatgtcacgggtcagccgcgccctaacggtgagaaattggcggagattgtgaccaccatgcgaacagaattccctgataccctcttgatggctgatactgataccatcgagaacgtcaaagtagcggataagttaggctttgatattattgggaccacgatgcacggctacacaccagccacgactggtgccaacattgctgataatgactttgcctacttaaaggaagtcctccaagccacatcacgccctgttatcgctgaaggtaaggtggatacgcccgagaagatgaaacgttgccttgacttagggtgccacgcggtcgttgtcgggggcgccatcacccggccactcgaaatcgcacaacgcttcattagcgccttataattttagacattaaaaataaaagccagtcgtaaacaaaataacttacggctgacttttcatttgttactgaaccatcgttaatgatggtcgatttgtcctgacgtatattcacaatagcgcaaatgtctcatccagatactatcccgcttgctctctaatggaacctaccaaatcatccgtggctggagcgttcgcaagcaatgcgcgaacatcatcaaggttcaccttaacattccagactaaaacaccaactaacttaccggcatctatgaaatagacaagcgttccatgcgttcgccgatcaaaaatcaattgcaatttaggatcaatattaccgattgcttgccaggaaatatcaaaaatcatggaatagaagtatggggtatgttgatagctcatgtgagcacctgccatattacggccaactaattcaccagaaagtcgggcatggtccacgtgctcaatccgttgccgacccaagatgtgatctggataagaggcaatatctccagcagaccagatggctgggtcactagtattgagatactcattaactttcacaccaccatcagctaaatccaaactactatcttcagccaaactaatccgcggcgtaacacctaacccaacaataattgtatcggctgcgatcaccgtaccgtcctttgtcaatagagtcaaatgatcaccttggcgttgatatgattggacaaactgaccactcatcagtgtgacaccattacgtttgaacgttgcttcatactcagcccgaatggactcaggaaatttaccctcgcccagcgctttttctgggaaaatcatcgtaactttagtcccattttgagtcagtgacgatgcgagctctgtaccaacatatccaccaccaatgatcacaactcgcttgttcggaccactaaatttacgtaacttgcgataatctgaccactgtctaaagactagcacatgtggatcagcaggtccctggatttgtcgaggttctccgccagttgccagcaatagctgttcatatttgatttgctcactatcagtcactgtaataaccttatcttgccgattaatagccgtaaccgttgtcttgaacttaaaagtcacattaggataattttcagcaccaatccgaatgttctcttcagtaaactcatcatctagccatagctttttactcagtgccggccgttcatacggaacatccgcctcttgcgaaataactaagattgcgccctctggatcttcctgtcgaattcccttgatggcatagccagcaaccattccgccaccaacaatgacgtatcgataattgtttgtctgatccaaatcactcatttaatcgcctccataactttactttttctaggaccattgtaatataaaaacgccatgattcgaaaaatgacgctcaagattattaatcattgattccttttatcagaacaataattttatttgcataccgccaaacatctatcaaacaccgctgtgatcaaaatttagaactgctgctaacacaacataaaataatgttatttttaattactcaacccaactttcaaggtaagcattctaaggaatgtttgatcatatcagttgttgctatggccgttttttttgatcttgtactaaactattgatcaattcgctatgctataataattgcgaatattcactttaactatccgtcgtttacaatcatcacacgttcaaaagtatcagtatattcggcatcataatgatgagttggtccttttaatattcacctgttaattttaaaattcgataagggagtgtggcctatgcgtctatggcatgaacaattaatccatcaattaccacgacaacaattactaggtcaacaccgtgagcttgccgcattgagaggcaatggttggggtaaaaatcatgcaaccgttaattatgttttcaaatattccccttacaagttgtatcaatttcatgtattagtgatggatgaaatgcaacttcgcggctatcatcctaataaaatatggtatgatccaaattatcgtgggcagttttgcccgccttatgatcacctcactcctattgcattaacaacaccaatctatccagaacacaacgccagctacttagcagaatgtgtccgcaatttagctgctaagggaattatcatgcccaccacatagccgctcttttattttgctgggtaccaactcaaccatcgatacccaaattgtttttccgcagtcataataaggccagttaatattaaaaaaggttgaactagacttgaagtgcaatagaaaagttagacttatttgtttaacgattgtagcgcatttcataccatgttcaacctctttttgtggcatccatcgatgttatctaagccccattctatcaaaaacgtgtcgtttttctaacgccttaatgaagtaaaaaatagcaatcacctgtaatggtatctgaatgatgacgcgtgccaatcttcccaacaataacactttaaaattagtgccaaatagtactgaaatcagccatgagtccatcatcagactaacaaaaatcattacaagtatttgcgtcatcacaacggataaccaattgactgatttacgatataaaaacaaaccgtcaataaatccccctaaaaatgcagttaacaaaaaggcaatctgaaacgcgccggaaccaaaaatagtaaagcttaatatatcggagatcatctccaagagaccaccccaaatgggaccatatagataaccaatacaagccatagacaaaaagccaaaagataattgaaaatacgctggtccgatagcaattttgtataaaataacgtctaaggctaataagaaagccgatgtagtcagcactaataaattcatttttggcaactgaaaaacatttttcgcaataagtttagacataggacaatcctctttttttgattttaatcataccctcattcttaataaaagtaaatattacttttattcgattgaaggtagtttaaaatcgtcgctcttgatttagttccttgaactcaatgatattactcatactaaaagccactaacaggtcaactagtacacccatcagtggctcattgtaaaattaatttttatccatgtaacttatcttgtaatttatcacccaagttatcaattcccttagcagtaagtacggtcccaccaataagaacaccacttacgattaaggttgcagctaaacaaaactttaaaatgcttttaatcatcgcaatcatctccttactaatccatccgtgtcagaacaaatgaggttatcgcaacaacaatcacaccaccaataattgaaggaacaattgccattccggctaattgtggtccccatgatcccaaaagagcttccccaattgcagatccaaccaatccggcaataatattactaatccaccccatcgatttacctttattagtaatagcacctgcaattgcaccaataatagcaccaatgatcaaaacccataaccaatgcataaaatccctcctagacttattaacccgcttaaatacaataatagaattacacgaatatttaagccgattcataaatgattacttcttataattatcattttacaattatcgataatgatagacaaatataacacattatttaataaatgggtcgctactatttctcatgtgacgattccgggtggcctagaaaatatcaaacagcttgatagctgattaaaattaaactacgccacatgaacgattaacttaactgtgcataatgattgaagtcactctgttaaggtgttagcgtttaaattgtgcaagagctttcttgtaatttacgtgaaaagggcgattaaaatgacggaaaaattaacgacggaaaccggccaaccatgggctaacaatgaacattcccaaacggcaggagctcgtggtcccgtattaatgcaagactataatcttttggaaaaactagcccattttgatcgtgaacgaattccagaacgggtcgttcatgctaagggggccggagcaaaaggtttttttgaacttgaaaacgacatgggggaatatactaaggcagacttatttaatggtgtcggtaagaaaactcccgtaatcttaaggttctcacaagttgccggtgaaaaaggttatcctgacaccgttcgagacgtgcgcggttttgccttaaaattttatactcagcaaggcaattatgatctcgttggaaacaacacaccggtcttttttgtaaacgaccctttaaaatttcctgacttcatccattcacaaaaacgggatcctaaaacgaaccgtcgtacacaaaatatgcaatgggatttttgggctcattctccagaatcattgcaccaggtcacttatttaatgggcgaccgaggacttcctgcgtcctatcgaaccatgaatggttacggttcccatacttttaaatgggttaatcagaatggcgaacagttttgggttaagtatcacttcatctcagaccaaggcgttaaaaatatgactgctcaagcagctgaaaaagcaatgagccaagatttagattatttacaagatgacttatatgatgcaattcaagaaaaaaattacccatcatggacgatgtatgtccaaatcttgccatatgaggaaggtctaaactataaatgggacatttttgatgtcactaaagtcatctcccacaaagactatccactaattaaagtcggcaaactaactttaaatgagaatcccactaataactttaccgatattgaagaggcggccatgtcgccagcaaattttgttcctggtatcgaaccatctcccgacaaattactacaaggtcgcctattctcctataaagatgcacagcgatatcggttaggtgccaactttgaagatttacccgtgaacaagccggttgttccagttcataattatgaacgtgatggttacatgaaaattaataatcaaggtgctgaggtcaactacgagcctaatgcactgcatgggccagaagaggtgccggatgccgcactttcacctgattctgttcgtggtgaaacacgcgcacagccttatcgctatcaagttgattacacaactcaagcaggcgacctatatcgcttaatgtcagaacccgagcaagaacgcttaattaatactatcaaagatgcgttaggccaagttactttgcctggtgtcaaagaactcgaaatcaagcaattttatgaggccgacaaaaactacggtacacgcgtggctaatgctctgggaatgaatattgctgatattatcagtgattaatattttgaccggatgttatccagcgcgatattatttttgttataaagaatgatgatgccgtctcatggttattaactaaagagcgacaggttagactcatatcgtgtaagtctagcttgtcgctctttaattaacaaaaaatcttagatatagcttactactcgaccatccttttattaataatgtgatcccctgtattaccatctagacgactcaacaatgcattgaactttagtcgccgaactggtcgtggaataaattggcgaatatcatcttcattaaagccaacttgaattttactatcactaatgatgataggccgacgtaacaacttcggatgatcacacaacaatttaagtgcctcattcaatggcatttcgggtaacttaggcgcaatttcaggatagtctttagatcgagctgagataatatcgtctacaccatgttcggttaaactcaaaatacgttttagatcttgcaccgtgggcgaatcaacactaaaatttttctccttgaactcaatcccatgtgcttccaaccattgccgtgcaactctagaagaatgacagcttgattgtgtatataacctaatcattcctaatctgcccctctctcgttaaaattcatcacagcgtattgatcgacattaacttctgcctgtcacaacatcctttaaactaaacgcattcgttactgtcatgaccaatccaataccccgtgaacacatctttattataggctctgaacaagggacataccgaccgttttaagacgaataatctgaggataatcgttttaagtacacttttaaacggtttaggaaagaacgaacccagtacacgtaatgctgacaaataccactgcaatttctaatcgaataacgctgaattttcatcacgtagcacataaaaagtcgcctactaatttggcaggcgacttccttggaactattatgactttttagcaagccatttagctagataacgattagcttgtgcagaacaaagcactttttcaccatttgccatggttaatcgtcgcaagtgcttgtccaatgacttaatgcgtttcaagttaacaacatatgacttatgacatctatagaaattaggactcaaatcaggaacgtcctttaacagtccatagtattctaattcaccatcatccaaatggactacgattttatggggactggttgaactttcaaaaaatataatgcttttaacattaattgatctgaccgtctcaccaatttttatttgaacatagtcgtcttggtcattttcatcggtttgaaaacgatcttgtgccacgtgtaaaaccttgctaaatcgctcatacaaggaatctggaaaatccttaagaataaaatctaatgcctcaacttgatattgaaacaccatcaaagataactccgtgtgtgtcgtgataaaaataatcttgctgcgccggcccatgtcacgaatctggctagctagttgaataccattaatatctgaattaagggcaatatctaacacatagattgccttttgaggctgctgtgcattaaccttgtctaacaattcgtggggatcttggcatgctaaacagatactcatgtctagctgttgatcgacgattaccttagtaatgatttgccgtatttgttgtaattgtttcggatcatcttcgcaaatatagacactaatcattctgagatactcgcttcaccgtcaagcgttgtaagaataccgctcctaagactctggtttcgagtatcatgttctcattgcgattaacaatcttacttaaactattcaatccaatcccccgattcttgcccttagtggaataacctgcctctttcagcttccataagggtggtaactgttcaaaaacattgttttgaatcaagaacaccgtactatttttttcgataaaaatggcactcataatctctccatcagcatgtcctaccgatgcttcaattgcattatccaacataattcctaatgcaatgtctaaatccaattcattaacagtaatgtcaattaatggttcctttaaatcaaaatgaacttcaatctcttgcgattgtgcatagctcaacttactaaataggatactcttaatcgacttcactttgacccgactcaaatcttcaagattatatttttcttttaacacccgatttgaaaccggtgcaagattcttttgataatattcttgtaaaccttctaaatcatcagttttcaaatattcatctatcgaaatcaacatattctgatagtcatgtctgaaacgtcgcaactcattatagtgagcttcgatttcattcatatagcgagtatcattttgtatttgtattctttgcttttggacttcatatttggctcttacattttttaaatattcgttataaatcaccaatactaaccccattacaactgacaatataattaaattacttaatataacctggaactgattttccagaccttcactcaacataatatacaagtatattatcattaataatagtgcggttatgcgatttaagctctgattactaaacgtgggactgaaattcgtgcgatccattacaatattaagaaaaattaagcttacgacactcaatatgacaaacactaccacatacccattaggaactttcattaaacgagttaatatatcacaaatatggtcaaccataatcgaccatatgaacacttgaaatgttatacatagtgcaccgcttagaactcgtacataccaccaagtgaaaaatataaacatcattaacattaaaaaagaaaaactaattcctaactttgctaaaaaaatataactcatcagcatacagacggataagaatataacatcaaaaagtctcacaaaaaatatatttctcaacaaagatttaattatcaaatagatagataattcttggaagacaatcattaacatatatctacactaatccttgctttttaattcatcaggaattttagtttcgaataatatcccatggcagcacataaccaactgtttagtacctacgtattgaaaaagatggctaagtactttatacattttttctttcataattttccctcctttcatagggcattagtaataaagcggctaatgccatcgcaattaaaatgattgtgccaaaataattattactaactatttgtaacaaactcaaaattaatgacaatccaattgcccgtcgctttaatttttttctcaatgacttcgatgtaataggattctttaccgtatcagctggagcaaaaatacttatgattattacaaatattaaacttaataacaatctgtatacttcagaaataccagttccaatcacatacggcacacccacaaacacaaagatagttaatatcgtacataacaaatccgatttcaagtgacgtccataggcaaagccacgcaaaactaaaaaactacccataaaaactaacactgggaccaactcgtgtagcagcaacgctaagataatagtaattatcagcttaggaataacatttaatacagtatcaatgcctagtttaactagtaatgcctgccgtctttctagttgaagattcttttgaatcgcagcgaataaccggtcgcttaatttataaagcaatagtttttgttctggcttttccatatcccactcctataatgctcaaatacatacctgtatcaacagtttaaaacagtattaattaattgaaaagaatacataaatagattaattattcaatattgttttaagactagaaataaacatttaaagatacatcagtttaattattcatacgaaactaaagtttcatataaaaagatcgttaatataaatcagtttcatcgatactcccccttaatttttccttagattacaagtcaaactagacttaatttcactaattcacattactcaatagattaatatcaaatggtgaaaatcaacgaaaaaaggagatctatcaagcaatctcctcttacataaagttatttatgaacactgatttaagctaagctgccgatatcacaatctcagcatccactaaatcagccttcaagtttttgacatctaagtggtcaaggtagaaatccgttaccttgtcacgaatttgttgttcaattactcgccgtaatggccgcgcacccattgcttcatcatagccttgttccatcagccaatctttggccgctttagttacctcaagtttgatggattttttggctaacgttttttgtacatccgccaacatcaaatcgacaatttgacttaagtcttgcttagtcagatgtgaaaattccacgattccattaaaacggttcagaaattctgggcggaaaaatggtgctaacttatccattaatgactgatctcgttgcttgtcaccacttaatgcttcattaccaaagccagcattagaagtagcgataataatcgtatttttgaaattaatgacattgccttgtccatccgttaagcgcccatcatccatcacttgtaacagtaacgttaatacttgtggatcagccttttcaatttcatctaataatacaatggaatatggattacgccgaacccgttcagttagagtattagcattatcttcataacctacgtatccagccgaggtaccaattaatttcgacacagctgtacgatcagcatattcactcatatctagccgaataatcgcatttttatttccaaacatatctaaggctaattgcttagctaattcagtctttcctacgccagttgggcccacaaacagaaaacttccaattggctgatcaccctctgaaaagcccgcacggttacgccgaattgccttcgctaccatttcaaccgcttcatcttgaccgattaccttacttttcagacgcttatcaagatttttcaagtgctcaatatcattagcgcccatatcagcaactggtataccagttaaacgttcaaccgattgtgccacatcatcaatcgtggcagtgattttttctttttgatccgtttttttaattttttgcttggtttcctcgatcgacttcttgatatcagcggcttttgtaaagtcctccgatttaacggcggcctccttagctgcctctaattttttaacgcgttgatccaatgtctcaacatcagtttgcgaatttttagccgctaaatgagccgcagtcatgtcgatcaaatcgatagctttatctggcaaagtgcgttgtggtatatattggattgaataatccacagccgccttcaaaacatcatctggtaatacaacatgatgatgcttttcgtacagctttttaacaccttgtaatatacgtaaagtgtcagcggccgtcggttcattaatcacaacatcattgaatcgccgtgccaaagccgcatttttcaaaatagtattgcgatattcatcttgagtcgtagccccgattacagtcagctcgccacgtgacaaagcaggtttaatgatatcagccaatcctttgccaccatcttcaccaccagtggcgcccgtgccgataatctgatgaatttcatcgaagaatagaataatattaccagctgctttaacttcctttactagctgtttaatattttcttcaaaagaaccgcgatattgagttcctgcttccaaagacgataaatcaatcgaatagatttctttatcttgaatcgtttctggaactttaccagccacaattgcttgtgccagaccttcgacgactgcagttttacctacaccagcatcaccaactaagattggattatttttcgtcctacgactcaaaatttctgcagtttcttgaatctcattctcacgtccaatcactggatctagtaatccatcacgagcctgttccgtcaaattagtccctaacttttctaaaatccccccttttttaacagcctgtttaccatctttagatacttctattgttttattattttggggtagcttaccagttgctcggtattgagcaaactcatccggtgtcagcgattgtccattaactaaataccgtgcacgctccgaattttgattatccatgcgccgaaataattgattgaaaacatcatccatatcattgttaaaaaaaggatcatttccgtagaaatttgccatattacaacacctccataaaaatttatatgtgtaacttagtgaccataatatcctttaaaactacaactgaatcgtatcacgatttttatgtatcgttaagtaaagtgcttatagaatcaattagaaataattagaataattttgtttaaacaaaagagaaatcaatttcataaaatgaattgatttccctacaaggttccctatttaatagcccttgataaagaacttgaattaacaagttactttccagaccaattttaatttaagagactgcgactcaaaaagcacacccagtatcaagttaaggccaactagttatcgttaatattgccacttaaatatcaatactagcaatcatgacacacgtgtaaaatcataaaccaaaacatattacatgacgtaacggcggtcttgggactgtaaactcacagtaatgattctattgagttggataaggtgccgatgaccagtaattgccataaatgcaattgctttcggtacaatcgtagtgacatagccaactgtctcggccatctgcccatttgttttataaaaccgtaatgagactcgacatttttgatcatgcgcttgttgtaatttacaataattattttcaacactcaaattaaagtctcccgttcaaagaattcaggtttatttattcgtcagtgaatctatgtgtttgtttttctcattgttgacggcgtaagtccacattaaggagtcagctattcagtaaaaactaaataactagtattcatgttcagctcagtataatatgcattgatggttactaatcaaaaatcgatctctaaatatcctaattactatgaaactttgaagttaatttatgagaaaaataactcacaacaaaactcatgattacaaccttgtcatcataactagattatgaaacattcagcctcctaaataaaactggtatgcgcgcatgtgtacagtatactattgccaagtatgtctgaataaccgttttaagacttgaaaaactcagctgggtgctttaggacgctttttgtgcattttaagacaatatcctaacttcaacgccggcatagcttcaattcgtcaatcagtgtcttagtttctcagctatttctgttcagaacatcttcctattacaataaaaagcgttgatctcagcagaatttacttccaccaaaaccaacgctaaagtgttattatatcaggtattttaaattcatttcagacattatattcagcattacttctactacctaagtaatttagcacgtttaacatcttcaatcgtcttagttcccgctagttgcatatcgatcaacagctcatcattaaggtgactcactacggaagcgacaccctgcgcaccacccaatgctaatccatagataatcggccgagcaagtgccaccagatctgcaccattggctaacgccttaaagacatgggagccacgccgaacaccgctatcaaaaattattgggacgcgcccattaacggcttgcgcaatctcgtgtaaaacatcaaaggaagctggaccaccatttaattgccgaccgccatggtttgaaacatagataccttgagcaccagccccgattgctaacaaggcatcttctggtgactggatccccttcacaataactggtaaattcgtatattccgtaatacgccgaacatcagccgggctaatcttttgcgccgcagcagcatagatttccatgatacctttccctttaccatccccttcgctgaacttagtcaagttagccattgggattggaaactggaaattgttgataatatcagcttcacgataaccgtcaactgttgcatcaactgtcaaaatgattgccttagcaccagccttcactgcttcatccagtaaactctgattaaaatcccaatctttgctcatatataattggaaaaattggggcgcacctttaccagctgcggcagtatctgcaattgacgttgaagagtaagtactctgagccataagtgccccaacttgagccatcccttcagcagtcgcagcttcaccccgtgcatgtgccaatccttgagcggccgctggagccatcataataggcgttttgagatctatgccaaaagcttgagtctgtgtgcttggctgttccatatccgtcaatgctcgtggcacaatttgaacatggttaaaggccattgtattctgctttaaagtccattcgtcttctgacccaccactaatatagccaaagcctccgctcgggatgatctttttagcagctgcttccaatgatggtaaatttaaaatcgttaacttttgctcacgatcactctgttcatatccattaataactgtcattatactaatctcctttacataaccctttataattcatttaataattggctaagtgccggttgatccgcttcagcgataccatatcgttcacgatacttagcaatcgtatctgcatcaaagttttctggatctactggaacaaaactagtatcaattggatcaacatttttaatttttgcatcaatcacaattggtagttgattaccattctgctgtagttgagtaactttctgaaacgttgctttcaactctttaaggttagtcactttaaaaccaatcgcacccatgttgtctgccatcttggcccaatcagcaccaatcaagtcaatcccatacggcgcctgattagcgagtaacttttcatgttgaataaagcctaatactttgttttctaaaaccacgttaatgactggcaaatgatatttaacttccgttagtaagtctggcatcaccatggcataaccaccatcaccagaaatactccaaacctgcttcttaggataattcaattgggcggccaaacctgctggcaaaccaaaacccatcgtgccataccaagccgacatcgtaaaagtctgttgcttattcaatggtaactgtcggattgcccattccgtattattcccaacatccagaccaaagacggcatcatcagtagcattgtctttaatagcttctagcaccccttcagccgtcaaccctccttgatcatcagtagcaattgtcttgagccaccggttccagttttgcttatcacgttgagcagctttcaagaacttagttggcttaattgtcacttcggattgaagtaatgcttggaaaaattcttttgcatctgcaagaacagtaatatcagcatcatgttgtttgcctaaatctgctaaattgttattgacttgaataaacttaattccttgtggcaagtaacgtgcaaacggaaagttagtaccaacaaacaaaactagatctgccgcttgcgagacttcaaaggcgggtttagttcctagtcgaccgcgagagcccatgaaattaggatggtcagttggcataataccagttgctggagccgtcgacaaaaccggcaaactaaatttttcagaaactgcgataacttcttgacgcgcattataggcacccttaccaatccataaaacagggtgttgagcagctttcaaagccgctatcgtctgctgaacatcatctgatttcggcattaagacctgttgactgccgctaagtgaagccgttttaaaaccatcaaactcaatatcttgaccagacaaatcatctggaatgataacaacagaaaccgaacgggtcgcgtatgctgatctaattgcttcatcaaccacgtatggaatctgttcagccgttgtcacttgtttatgaaattcggctacatctgcaaaaattggatcttggttcatttcttgaaagaagttcgtattcataatggatgttgctgattgaccgactaaagctagcaccggtacgtgatccatcttggcatcgtataatccgttcaagagatgaacggcgcctggtcctgctgaaccaaagctaacaccaatcgtccccgttaatttagcatctgccgcggcagctaaagcaccaacttcttcatgacgtacttgaatatacttcaagtggtctttctcttggtagaacccatctaccgtattattaatcgagtcagctgtaataccatagatatgatcaatgttccagtcgaccaacacttgtgccaatgcttgtcctgctttaattttagtcatttccattaccctctttttgttgttacttttttaagcacaaccatatcctaaataaaaacttgatccttgtcaagtctttatcttaaattatgcttgttgttgaacagcgctaatgtcatcaataatatcttgcagcgtcactcgcgacatacgtgcctcagcactattctgaatatcacagtagtatttttccatcactcgcggaattaccgacccgaccggacacgtctccgaagtattatggtcaacgtttaaaaaattacgcttagccaccactgctacatagatatccttcaaggtaatatcattgggcgaacaagctaatgttggtctagcaacgccacgaaccgaagttaacaagcctgcttttcttaacttactcatcattcttctgaccatggtaggatccgtatttaaactactagcaatatgctcacttttcagctggtcatcagtatgcaacgcaatatatgccataatatgcgtcgcatcacttaattgtgtattagccatctagacacctcccatatccatctctattgttacttattttagcacatctagcatgaacataaaagcgattaaggaaataagttaggcttctttccctaatcgcaacataagattatttgataatctccattaattcaataaaacttattcaagacaccgatagtagctgaatttaaaacccaccctgtccaatttgatgttgcaaatcatctaagccaaattgttttaaataagttgaaagtggttgtaaatcttgagcttcataccgttgtttaaatgcttcaatatcagctgccgaactcattgccgaatctaaacgaagcttttcagcaggcagtggccgatctcctgtaatcaccgcatcaatcagaactggttcatactgagcgattgctttggcttgttcaaaaacatcaggtaattgctcaatcttattaactcgaaaagcttgcatgtgcacgccatcggcaatcttactaaaatcaatatcattgaattcaacgccaataaaatcattctgattagtatcttcctgctcatctttgataaatccatattggcagttggtgaaaacaacattaatcactggtaaatggtattgaacttgcgtcgccaaatcttgcatggtcatcgaagcgccaccatcaccagccagattaaacacctgccgctcaggataattaagtttggcagcaattgctcccggaataccaactcccatcgtagcaaataagttagaagtaatgtgccgattggatggcgttaatttcaaatgtcgattcgcattcaaattgatatcaccaacatcaatcgaatagattgcatcaggctccgcaattttattaaccgcacgtagcacttgatatgcttgtaaaggcccttcctgcttatcttctaatgaagctagataagcccgccaatttttaacattggctaaattggcttgccaccaaggtgtcgactcccgttcagatacctgtgctaaaattgcagccagcgtcttttgtgcatcagcaagtaccgcaatatctgttttatgtcgtttacctaacttagctggatcaatatcaatttgtaagaaataacgcgtatttttaaacgctttggaaacttctgcaaacggataattattaccaacaaataaaacaacgtcagcttgcgcaagtgcctcattcgccggtttttgtgccactcgattagcagaacccaaataggctggataacgatctgcgacaatccccttagctggatacgtactcattaatggaattttcaacgttttactcaattgttcgagttctttaccagccttacgagctccaatgccatagtaaataagtggccgttcagctgcgagtaaagtctgtgtcaatctcgtcactgcttgaacgtcgggttctggtaataacggcgtttgataactattagcggaagcataccaatcttcagctggaatctgttgccatggtaaatcgactggaatttgcacaaccgcaacaccttggtgcgcataggcgcgtcgaattgcttcgtcaataacatgtggcaacgtggcagcattgacggctgttacattataatctgcaacgtccgcataaatcggattctcattcatttcttggaacgtatccatgttcatcccagtagtgccaaattgaccaataagcgctagaacagggacatggtcttcacgcgcatcatataacccattcataagatgagtgccaccaggtcccgctgagccgaagcaaaccccgattttacccgttagcttagcatcagcagcggcggccattgcaccaacttcttcatgccgtacttgaatataatggattcgatccctttctgctgataatgcgtccataatcgaattaattgaacctccaggaataccatacaaatgatctactccccaagcttctaaaactttaataactgctgcacctgctaatatgttagtttgttttgtttgtttcataaccataataaagccccccatttcatgcacaatttaattacgcgcaacttaataaacgaatattaccacagcaaacgcttacattcaagtgatcataaactagtgctttttaccacttaatcacgattcaaatgcattttagatcaacaacagcgctagtctgcttacctcgatgaaccaccatcactgttgaaaattagtatctcatacattcgttttttaaacaattttagtaattagtgtatgttttacaggggcatacttccaacaatgtctgcatgtttagaagctagccattcttcgcctcacactactatttttgtttcatacgtccttatttaattgtggataacgctctagcacatctactgtatcccgattcaaagcatgatcagcacataaaataactgcagcactattcgaatctgcacggtaatactgactgtttctaattgcaaataacacaccattttgttttgcagattgaatatattgccccatgatatccatatcaagctgaccatttattaacaattgatatttgctgttttctttcaaaaggcgctgtaagacgccactacagttatactttaacgcttcagcaaacgaaattcgcaactcaatacgttcataaaaagtacctaaacaacgatgctgttcatcgggtctcactaagggtaacccaaacactgcattctgaattcgttgatctaaatctggtcgtttaccttgcatactcacacctcattaagcaaaaatttctgtataaaagacaaaagaagatccaaacctcgccaagagattcagacccccatttaaaaatcaattacgttgcatcgtatctaatccgtaatgctttaaattaagaaagatatgtttatcgaagaaaccaatgaacgtgccttgaaagaacaagcaaataacggtaccaacattgacggcccataagtgcccactaacgccaaacgtaatcatcataataattatcggtggtatatagtgaactatttgcgccactgtagcatttccatgcacatagcggaaccgtataatctgcataaagtcatcgttcggatgcagaactaagtttgcgcgttgataaattgatgtcgctaaagcaacacatagcacaccaaacacatcgatgacaattcgtaatgccaacggtaattctgcaatctcactccgctgaatcaagtcagtaaaccattgaatcaagaaactgaacggtaaagtaaataacaaattaccgattacacgtcgccaaatgatttggtgaatcaagatagcattcatagtaaccaccagcacaccacaagtaaacaatgtcgctcgcaagcttagtggccatagatggtacagatttactgctgaagctgtccatactgcactgcccaagttcataacaacggttaatgcatgaccaatcgaattaattaggagtgataatccgagaaataaccatcgttttagccaatcatgattgggcatcactaacttggtaactgccatgataaccctcttctcaggccaaacttagtcaaccgttgctccgactgcatctggtgttaagaagtcttcattggctttcaagtcaaaacgcttgattaagtcacggaaatctttgtcggtcaacgattgcaagacttctccaccttgttcacgaatcgtcgtgtagattaatgctgacttttcaactgtttcaactaacccgtaagtttcatccagagagtcaccagctgcgaagacgccatggtgtggccatacaactacccggtagtcggccatcttagcagccgtcttttcaccgatttcattagttcctgggcacatatatgggataacgcctacgccttctgggaagacaacgattgattctggatgcatcttccatagcgtccgactgaaccgcttagatgacaacggaatcgtaaaggtcattgcaaccaagttagttgggtggcaatgcatgataacccgttgatcaggatcttgcttcaaccgagcaatgtggctcattaagtgtgatggaaattcgctagttggttcaccaccatcattgaagccccacattaaatcaacactgttgccgacttcgctgattcgaatcaagcccatgtcacgttctggaaattcgaccatattcttaaagtaccggccagttcccgtaactaagtaatacttgcccgctaattcactggcatcaaatttaattggaatctgacgtaaaactttatccgtaccagcataggcttcaacttcctctttagtcagtcgtagactcacgttgccgccattccgttcgtcccagccatgtcgatataaattttccgttgtttgtgccatatcacgtacatatggtgaatcaataaagtctgtcataatcattgccaaccttttcttgttaatttttgttgtaactaaccgtcgttattccgtaactacttttttgtcccgagggaattggactttctgttcatagttatgaatttcatcaagccaatcagttcctactggtgtattgttcttcaagcagaattcatcccaaacagcaccaaatgggaaggacttcaattcttcagtaaccgccaaccgcttcgtaaagtcgtagtttaattcagctttcttcaaatcatcaattggtgctaacatcgcttgtaataaggccttttgcgttgcccgcgcaccgataacccatgcagatactcggttgatcgtagcatcaaagaagtctaaaccgatgttagtccgttccaactcgttatcacgaaccaatgaccgagtaatccgttgtaaagcttcgtcaaagattacaacatggtcactgtcccaacgaactggacgtgaaacgtgcaacattaatcctttgccaaacggcatgaaagcagagaacttatccgaaacatcttccgttgggtgccagtgcccagcatcaatcgtccagagtttgccccggctgatggcatagttgttatagaacagatgggagccaaccgtataagattcaatccccgtaccgaacagcttaccttcgacagcttcgatcgtattcttttcatcgtacttcttggcaaagacttcatctagggactcaatcaaccgttcccgtggtgcttgtttatcaattgggttatctttaaaaccatctggaatccagaagttattaaccgattgttggcctaattcttgcccaaagtaatttgcgatttcccgcgatttcttaccaacttcaatccagtagtctcgtactgacttttcaggactagctaacgtaaagttatgcttaaccattggatgggagaagaaggttggattcatatctaagccaataccttcttgtttagcccaatctacccaatatttgaagtcttccggaccaacttcgttaaaatcttttttcttatctgtaaccgcatacaaagtatgcaaagcgactttatgactcccaggaattaatgataatgcttcgtgcaagtcaccagttaattgatctggagtccgcgcaatacctgggtaatcacccgaaacaccgatcccaccagttaattcttgatcagggttcaagaaaccatgaatatcatcaccttgccaacaatgaacagacaacttgaccttctttagtgcttccatggccttttcagtatcaacaccaatttcagcgtaacgttcttttgcaacttgataggctttttcgacttcgtcagttttaaccattagtatttcctcctcgtattcaataagtaattcaggttaatctaaatgaaagacttcttgtaaatcagtcgtgactggactattgtcctcatttgtatccatcaacggctccatatatttccaccactttttacaaatatcagtttcagcgatctcgttgtaagtcgcttcgtctggaacctcaaggtaagcaaaggtttggccagttaatttatttaagaaaattgaataattcgttgcaccatacttcttaagcgccgtcttcatttctggccatagttccgcgtgccgtttagcatattcttcgtaggcgtctttgtgtaaatacatcacttgtcctaaccgaaccatttaaaccatctccttagatttatttgttagaaatcgttgatactcttttaaaatgtcgccatacttattggtctccggcaagtaccgctttagatcaaatgacgtttcaatcaaccgccggcccgctccaatgttctctacttcatcactagtaatcatttgaaccataatgtttccaactgcagtggcttcactcggacccgccacaaccttgatattagccagggtactcgttaactgattcatcagagcaacgttacttccgccaccaacaatattcagtgtatcaatgtggtagcccaagatacggtcaagtttattcaattcattggcatagaacaaagacagattagaatagattgcctggaataattcacccggtgtttccggtatcgtctgctttgtttcacggcaataatcctggagttccttaatcatattttcgggattagtgaagcgttcatcgttgatatcaatgaattgttggaatggtcttacttgttgcgccaagtcagccagttcaccaaagctatactgatcacctagttcatgacgaacacattgggcaacccacaaccccataatgttttttaggaatcggtaagtcccgtatgcgccccattcattcgtatagttctcatgaaatgcttgtaatccattttctggcacatttaactcagttcctagtagtgaccatgttcctgaactaaggaatgcccaccgatcaccttcacctggcgttccaacaaccgccgaggccgtgtcatgggttgcgaccgtcacaacttcaacttccggaatatcatattgagtgtgccatttgtggctcacatttcccagaaccgatccggactcaactagtcgtggaaattggtcttgagacacgttgactttgcctaacaaatctttatcaaataaaccgacacgcaagttcaacatctgagtggtagaggcattcgtgatttcagtaactgcattacccgtcaaaacatatccgagataatccggcatcatcataatcttgtccgtcttagccaataaatcatgattctctttatacaattgatagagcgtgttaaagtcttggaactgaatgccagtcttttcgtaaatgtactctttgggtaggtcgctagttaactgttggatcgcattatgtgtccgcttatcacgataactaattggatcctccaatttatgtccgttttcaccgacaagtacataatcaactgcccaagtatcaattcctaactcaacatcctttatccccatctttttgactttttcaaggcctttaaagatttcatggattaaatgatcaacatcccagcgatcatgaccatccttcatcgcaaatccattggagaaacgatgcacttcctttaacgttagctggccacgcttttgctgaccgagcattaaacgcccgctagaagcgccaatgtctacggcaatataagatttcattacttcacatctccagtagcatttgaattaatcggtgtctgtttatctttggcgtcactttcgtcaaattcgtcaccataacgttcctttgtaatttgttccagtgatttgccgcgagtctgaggtgtccaaatgaccccgataatcaatgaaactaacaataatccaatcataaatgttccggcagctttgaagcccatcgtcgtcagaatagttgggaagataattgaccaaataccagctgagccacggacgacgaagaacatcacgccttgagagcctgcacgatacttagttgggaataattcagtcgcccatagtgcgtaccacgcttgagccccgatccctgcggagatgccccaaacagcaacgaaaatccaaagactagtccagttcatcccggcaaatgtcaggacaacccaagaaacgacggccattgcagccccaactgcaaagaagattcggtgattagcacgatcaccatagcgggcaaaaccaacataagtggcaactgcggtaaagatccaaaggacggcttgcagtaagttggcctgtagatttgttaacccaccagcagtttcataaacgtatggcataaagaagcccattgcaccggcaactagattccagaacatgtaaacaccaattaaaaatagcaatgactttaagttaatgacatttgagaataagtcacgatatggatgtggcttctcaccagtcgcccgctcgtgttgtttctgttcaacccagacttgtgattcgtccaatttactttgaagacgccatgcaataaaggcaacaattgttaagaaaatgaataagatccgattacccatgacacctagtggcgataaggcaacaccggctgcaaaaataatggcgggccctaatgaccaagcgaattgtgaaataccaatgttctccgcccgattagttgattctgacgtttctgaaatataagtccacgatgcaggaaccccagcgccgaccgcaatcccagtaatcaggaagccggctaataacattggaaaattaactgaggctgccacaataatcgtccctagcatataaacaagcatgtcataggtatagataactttccgaccatatttatctgacaagtgaccaccaatcaaagccccaatcgcagaaccaaatgcattggcactcaatgcacctagtagtccaacctgaaagcttgataatcccaaggctttagtccatagtgttaaaccacttgcaccagcaacaattgacccagaatccaaaaaattagtaattgatacggcaattgttgagccgtgtgattctttttggttattactcattttaaataccctccttttggtaagcgttttcatttatttacaagcacattgtaaccgccaccattaaggtgctacaataactcttaaaaggtacattagtatcatatttacagggaggattgtgaatgaacacacgtattttgaacgctttaaagcaaacaacgttgattgaagaaaagcaaaaagcgtctcactgtttcgttgaagacatgccaccctatgccattaaccaggagctttctttaaaggaacatagacgcgtactaagaaattatttttttaagaataaagacatttatatcagtcgtcataatcgctatgcagattatccaactcacactcatacttttttggaaatgaactatatgctacaaggtcatgcaactgaaattgttgatgataagaagataacgctaaataccggtgatttattgcttttagatgaaggatcaacgcactcaatcaaggctttaggtgataatgatttgttaataaacattcttttcagaaccaaaaacatcagtattaacctgttaaatgaccttcgtagaagcaataacattttttatgactttttgctcagtcaagttattgaagatagtaaccataagcgggactacctcgtatttaccaaaaagcgtaataccgaagtcccggaaactttagaccggatcatcgatgagtattatttaaagcgtgatttttcgaacagcattattaaatcctatttatcaattttactggtccaattggttcgtgaatatcctttgaatggccctcatcaagaaaataaatctagtctgctagccattaaggtcctaaaagcaattgccgaagagtataagaccgtaagcttggaggaattagcaaatcgctataattataataaaaattatttaagtaacatcttcaagtctgaagttggccaaacttttagtgaagttctaactcggcaacgactaattcaagcccacacgctaattgcatctacctcactacccatcgctacaatcatggaacaagtcggaattaagaacaaaacattcttttatcagaagtataaaaattattataagacgctccccagcactgatcgctaagcataacgcaaatatcggccattagtctgtattcactatatagtgatacaaactaatggccgatatttattatttcactaaatttatttagaccccgggtaaatgactttaacaccgagtgccgccatatgttttaaaaactgatctttcggtgctctatcagtcacaatctttgaccaggcaggaaagctggctaaccgaatatagtcagaattaacagactgaaacttagtgtggtctgcaacaagaatgctttcacgagcacttttcatcatcgcaatcttaacatctgcctgatccatatctgcaatatacgctcccgtattatccaacgtgctacaagaaacaattgctaactgcggtctaaacatcgcaatatcttgaattgtatgattacccaataatgaattggaattaggccgtaacgaaccaccagttaagaatagatttaaatttgtcatttgattagcagcaatcgcgaactgcagattgtcggtaatcaccttgacgttttgtcgctccgataagtaattcggtaaatacgccgtcgttgtactcggatcaatgaacagtgcttgattatctttgataacccttcttgctaataatcgacaaattacctttttctcttcgacatgcgtccgatatcgaaaaggtgacgcaaattcaatattggtattttccaataaagagaccattccaaatgtccttttgacttttcccgactgttccaaaacaattagatcgcgtcgcattgtagaaacgctttcgccagttagttctattagtcttttcacactaattctggggtgtttgttcaatatcttaagtatgtgtaaaacacgatcatctcgacttaccatattgccctccatttgaacaattctgaattttttcaccttaatctgaacaattaaacaggaaaaaattgaatgagtttcatgttacgtcgaattgaatacaaaacgccgtaacgtcaacatatactgattgttgatggaagttagtttggggcctatgatatttagtgttaatggataaaatccatcaataccatttttatgtacaacaaaaggacatatcggcttgtgctacaatcaagtcgaccaaaaccaattgaaagcgagtgtcagatatgttccaagaccattctactaaagtgctgctccaaattaaagacccaaatattactgatttagttgttcaaggagctactaacggaagcttacaagtgcttgcgaagctaacgtatccggttactgtttgcgcacgttgtggcaaacgttccatggttaaggatggctttaagaccgttcacatcagaattcctagaattagcgaacgggtcaccatccttaacttaaagaagcagcgatttatctgtaaaaattgtggtaaaagtagtttaacaacgactacgctggttaaaaacatcatcaaatatctgaaaacagtctgcatgccattgatctatcattaactgaagaccgtacgatggcgagtattgcggctcaatacaatgtctcgaccaatacgattagtcgccgaataaagttgctcggacaaggtacccaaccagctttcaacggactaccaacgatgctttgtatcgacgagtttcgttcaactgataaacaaatgagttttattgcggtggatgcccaaacccacgacatcattacaattttaccaggacgtaagaatgccgatattaaagacttttttctcaatcattattctaaacgtcatcgtgaccgcgtaactcgggttgtgatggactttaattctcaatatcaacccgcgattcgaacactctttctgcacgccaaactggtcgcggatagctttcaccttgttcaaatggccttacgatctttgaatcaaactcgggtccaactcatgaaacgctttaaccctcagagtcgtgaataccgagtgcttaaatattattggcggttatatttaaaagattatgacggcctcgaaaagcgcaagtcccaatggtttgtgtatattaaaaatcgcatgacacaagagcaattagtcgtagccggtttaaatctagaccaacagtttcgacaaacctaccaagccgcacaggaggctgtgacataactagcctctgtataagcaaatgggacgagaaaccgaattttggtttctcgtcccacttgcttacgcctttgatttttaaagttggtccctaccgtgaccagtttcataatgtttaacgccagtattacgattccggcttccttggtgaccttgtcgaaacctcgcaccgagaatcgattgaaatgtaaagaagccttcatcttgccaaaaactggctcaacatcgatcttacattgagcgtaaatctaaccagtttctggagctgaaagtaattctcgttgtttcgatttgaaatattcccaattttcgttcacggaaatccttttaagatatccttttggtgttagtgccgcggcaattagttgatgattttcatcatacttttcggcaatgtattctttaaagtcacgggtaaaaccatacttatcagtccgttgacgataagcattaaaattaaaccggacgttttgcggattgataaaataatcatctttttcatgatagtcccagttcataaccttacggtcatcactttgccattttcgactattctctttaagcattgtgccgtatggaattaaaacggtatgctgaccgaattcatcttccaagtaccgataattactttcggaaccgtatccggcatcggtaacgatggtgtgacctaacacattgttggcctttaaatgttcaataaacggttgtaaggttcgtgtgtcggttggattttggaaaagccgatatcccgtaatgaactgattactcgtggcgatttgaacgttgtaggcaggttttaattgaccgttttgcatcggatcttccttgacccgcataaaggtggcatcgtgatccgtcttagagtaactgttacgctgaccatagcttgcttgctgtgcttggtgttcacgcattttatcacgtcgtttgtccaacttacgtttttgtgatttaacagtccggcgttgctgtttggctgggttcggggaaacctgcttagttgcttccacggtttcattaaggaccactaagtgatcctcaaccttgctaatcatgatatccaatagttcgggagtcagctctgatcctgccggaatttcaccgacaattttagcttcatgaagctcgcaacaggtcaacgagtttctcgcgattcatcttgtcaaatcgtatcgtattctttttccaaacaaaactatacttgttggcgtcggctaggatcttagttccatcaataaatgaaacatcatcaatcatgccattttgacgaagatattgagttagttgtgataagctatcggttgtcaaagtggccagttcatcagaaattctaaagcgacaaatcgtccggtaggacggaatttggtcggcaattaaccacccagctggcttgttttcacgggcaaaccgttcaattttacgactgctgaaaatgccatagcagtatgctaaaaggaccagttttaacatggcaccgaggttatattcccgcggacggccaaactggtaatcatattttagttttaaactctcaacaagctggttgatgtaacgagcaggacgatgctcttctggttggtaatccaaggcgatactcaaagtggtttgattcatgttataataatcttgcatattaggaatgtcctttcgaggataatttcgtagagtatcgggtgcgaccgatgctctttttttattttctattatatcaaaaacaggtctggaaaaatccgaagatttttccagacctgttttgtttctagagacttatgtcacagcctcctaaatataacttcatcaacaccggttgacagagacccaaaactggagtgcgaaaattcacagattttcacactccagtttttgttaaaaaatttagtcacaacttcttatttaattttttaagctaattctattcaacttacgacttagttccatgacttgttttgacaagcccattagctctgcagctaattgtggattctttaaattgcgggaaacttgtctttcaatcgtccttatttgtttttgaccttctattgtcattgaaaaactgagctgtcgccgatctttttgattgacttgtgactgaactaaccctagttttattaattgccaaatatttttggatactaatgttttttgtgttctcgatagacttgctagtttacttatattagtcttctgaagttgaccaacatacatcagtaactcccactctctcatagataagctcgtttcagttaactccagtgtcaacaattgatcgatatgacggcgtatttttaataatttctctaaaatttcaagttgaaattttatgtctatattttctagcatagccccacctcatcttaatcctggtgtttccgtatcccaagaactcccaatatgccactgacagctagcttcaatattctacttatcgataatccttgctgattagtttcatcaatttgaggcaacttgtgacacacatattgattcccagtcgatttccttgtacaacttatctcaatctaacaacgtcagtttgctgggcttgcctgacttcactgatatgcttgacctaaccggtttacccaataccactgatgtaattggttcaattggtttaccagatttcactggtgtgctcagttcaactgatataaatgcttaacaaaaagatttataaaccattacttaaggtccaatctactatcccactaaagcttccagatttagctttattatttgccttaatcaataaaccagaatcagaatcaaaagtagcagtataaacactgttattagccgacatattgttactagacaaaaccgtttgtgcattagttgatagctgagtttcagtcatcccgttcctaaaccacattgtaaatggttgtccgagttgtttttcagtgtacgaagcagtgattgaaaaattaggtttagccgcgcgagtatcaatcacccgaaatttcacagtatctccagaagttctcgatagatactgactactacttgtcaatttatcaagcccataattccaattataagtcccgctgccaagttccgttcctattaactgtgatgaaataagcattgcattatccgttatagccgttagcttactcgaatctacagtgcttccaaaagtattaaaaacagaatcattaggtgtcaataccagatagctatcagcatcagatggaacgtcagtagatgtatagccttgagaagtgctaccacctacaaagttaaaaggaatcgtactcgtactattattagttaatcccccaccattgaagccaccgctataagttgctaattttgctccagtgcttacggtcattaaactattattcccccatgaactcgaattatctaaaggtgaagaattagttgaagtaatcactgtactagaagtatttgcaaaattaccaatcaattttactgtgctcatttttgaattaaaagcagcagtaccagtttttatattagtttttgaaccagcattggaatttaatgttacaccatttgtccctgtaccaaataatgtggtagaagacgtggtaccagtggaaattgcattcaatgttccattattattaatggttaccgcattatttgttcctataaatgcaaacataggaactccagtatctttattatctaaattcagagttgaccccgatgaaatatcaatgggaaaaactttactgtttaaattattataatatggatagatcatcgcaccagcaaattttgcagatccatccccaccacttaatgtcgttgtgccggaacttactttaatattgggaatttctcctaactgttgaccactaacagaggtattaattgtattatttccagtaaaatttattggaacaaagtaagtagtcaacggttgattatatgcaacactgttaggcatatcataaacgacattattgtatgttatttgtgctgaacaatcagttgtcccacccgacaaaccaaaatcagctgaaaacaacattccataataggtattataataataacttcctactccattaccagacggacttggaacattactaatactattactagtactgttgctggtgttgttaacattagacaatgttaactgtgcactacttgctttaggaactaaaatccgcgatgatgttggactagaaacgtaaaactggtgttgttgaaagtcaacggtgacatttttcagtccactatacaatgttgagtcacttgctggcaaagtaactgtattagccactttaattgtcatgttttcgggcggtatattgctacttgaccaatatgatgaagtattagctaataaattaaacagatcattaccgcttgtaacagtgtagttactacccgatactgtaatacttgctttaactatttgaagatttacacctaaaaagcaaaaaccaactaggctgaccatcgctatacccaatcgtattaagaatcgtttaaccatctagtttccgctcctccaaaaaactaatccttatcttttctcctctttttcaacaaaagataaaccaaaattaataatattaatagcaataaccctaacaaggtccaaatccaattaggaactcccattcttttatacgaaaccgttgccgctttttgagcattttccggtgacaccttgaaagtccgaatccagtgccactccttagcttcttttgttgatgtaaccttaaaatccagcacataagtaccaggtttcaaactttgacctgatacaggcacttgataaacaaaatctgagttaggagccactgagcgattaatctgtttatcatcaataataaccttatcttttttactttgacgataaattttggcatgggtttttaaatcgtccacatatgccttgtttacgtttgataaatttacattaactgttgaagttaaattttgagtagcaaagctgacctttcttaattttaaagaaggaactaccttgttattattctgtttcaatagaatgggagttacataattaaatcgattagtatatccattttttattttctgggtaatatttttacgaacataaatgccccctaatattatcccctcaaatcttttcgcgggcattttaagatttaatttaatagttttactgctatgtgcttttacttgaacagataacttttttggtgatataaaattgttgaaatctaaatcttttgataaatgagatccagcaactgccttcatcggcgagtaatcaatcaacatatttgagttcgtcaaggcgcgattagctgttacggtataattattaacccggttgctctggttaattatgtttagagataacatagttgctgttttcggtggtatctttaaataaaagtatggcttactgttatctgcctgataactatttttatttatagttacactgaattcagctcccgtatcagcccaagccttggctgtctgtaaaaagaagccaagcataataataaaaaacatcaaagacattcttatgatcaagcctccacatttaaaagaagagacttgcttacaactcatacttttcattgttaatccaaattagtagaaatattgtaatctatggtgccactatatgttcctgctttgacgccattcgctgttgccaaagccatggttgcgcctgtagtacccgaggtaaggttcccatttgagttctcattaccagttgctaccgtattcgcggtctgataaatatttacagcagcactagtaccggaaattttacccccggttgtagcgtcagcaacaccgtctgctgtagtagttgtgaatgtactgacaggtaaaacattggctccatttttcaaagtacttgcattcgccgtaattgtgtaacctgtatttccacctgtcaaatccgtaacatcatatgcttgtgaaccagttgcagtaaatccgctgtaactgctggccaattcatgcgacgaaaagtcataactaggtactttatttaaaaccaaactacccgttgtaggtgcggtaaacgttactgttgtatcaccttggccagttgctgtggtactatcagcatttgccatcattggtgtattaagagtaaacaatgcaagacttaaaccagtagcaataattaattctttttttgaaatcatataaatccccctactttctaaaatgataatcgcagtatatcctatggttaatcattaacaatatgattaattttattatatcatcgtttagaatataaaaaaagttttgcgaatataataacccctataatatttaagccaatccaactataaacactatcttgactttcatcagtttgtggtaaaatcatattattttgatgtttaatttttgaaggttgttttctactagattcaggtcgtctctgaggatttgttcttgacacaaagctaattctagtagttcctactgcatcattatctgcataaactggcataaatacgcttaaaacaaaacacattactaaaacactagatataatttcaaattttaaatttaacttctggtgttttaacatacttccatcccccttgattaaatgctgaagcaaaaaataacatctcaactaatcagtaatctaaactattggtatgaattgctatttagaaagctttcattttatgattcaaatttgtctgaaataaaaaatttataattttttctcaattactatattatcatttcatataatctaaacctatttaaacgttttttgaagaaagctttccaatccaaattctccaaaatatttatgattaatatgcaataaagatatcatataaccatcacaagtgatcagcataatttttttgaatttcgctctaagggtatagtatggcctgtagtaattcatggtactattaataactataaataatttatcatatgattgatgaaatttattttacaatgcattaccatgtcacaatcactatcatttatcgaaactaaaaggacggtactatgaaggagtgactccgtgtcaagtagactattaaataattaaaatcttatacacttccttgaacggcatgattctggtattcttccagggtcatgccgtttagtgtcaattggcgtcttgccgtgttatgccaattgatgtccttcttgatgatgttaacgagctcaatttcagagagtgtttgcttgaatgccaactcatcggtcttaaattggctccagaagctttctatctaaacgtgttgtatgcacctgatgtgtaggccaatccctggtcagagtgtaaaatctcaggtttgacaccatgggttgcttttagcgcaggcgttgtgccatcaaagctcactacaatcggtcaaccaggtaatattcggctgttcagggttaaagtcatgactaccatcttcaaggtgagtctacttgtagtatgcggcacaagagattccgacatagttacacataaaaatgatgccatacggttgattagtgtcgggatttattttttgtgagagtgtttgaacggtttgatatttttcttctgaagtgcatctatcctttcgaactcttggagtttttttaaaaccgcgacctccgtagagacacgttctagccgtgctttaaggcgtttgatttcaagatctttaagttctgattcagtaaatttaccgttatcttctttagctttacggtctgcgagttcgtcggggccgccttgcttgaatttcttgacctaggcatacacttgactataagacacattgaagtgagtggtcgcggcgccgtagttcatttcattggcaatggtcccttgtgcaatttcgattcgttcaatctgattggttttcctatcgtttttcattggggaggccctcctattggctctgagtggtttaccactagtataccggttaacccactgatagataacggaacgatttggaataccatattgtctggctagttgtggatatgaagttccgcctgctaaatatgcttagaccacttcaagcatgagttcttctgagtacgcgcgtcgatgtcgacgaccactcagtgcttctggcccaccgtcatcatatcgcatgatccactgtgctacttgtgaatcatgaataccgtactctcggcggcttgacttagccgatacaccctccttcaccaatctaatatagaagagtttctctttcaggctataccttgaaccttttcggcccatgaaaaatactccttcctaaatagacaaactttaattatttgcttgtctaccttggtaggagtatatccatcaatggtcttttttattgaaaaatttagtcacaatttcttatttgattttttgaactaattcaattcaatttacgacttagttccatgacttttttgacaagcccattagctcttcagctaattgcggattctttaaattacggtaaacttgtctttcaatcgtccttgtttgtttttgaccttctactgtcattgaaatgttgagctgtcgccgatctttttgattgacttgtgactgaactaatcctagttttattaattgccaaatgtttttggatactaatgttttttgtattctcgatagtctggctagtttacttatattagtcttctgaagttgattaacatacatcagtagctcccactctctcatagataaatttgtttcagttaactccagtgtcaacaattgatcgatatgacggcgtatttgtaataatttttcaaaaatttcaagttgaaattttatgtctttatcttctaacatagccccacctaatcttaatcctgtcgtttccgtatcccaagaactctcaatatgccactgacagctaacattaatagtccacttatcgatactacttgctgattagtttcatcagtttgaggtaacttgtgagacacatattgattcttagttggtttcctgtgcaacttatattcatctgacattgtcgtcttacttggttcgcctggcttcgctggtgtgcttagacctgattgagaaattattgtcaccgtatccgtggctttaattacattgcctgcaccgtcggtgtagctatacgtaatcgtataagtaccagccttcgttggatcaacactctccgtgaccttcactttactgaaatctaacgccttaccatgctcgtccgtggcactaacaaagttatattcagcttgccatttagtcatcggacctgccattaatgtactattattcgttttgatccctacttgactggcaactaccgtgactgttgccatttaacttactttattgccactagcatcagtataactgtaagtcacagtataggtaccagctttacttaaatctggttggcccgcactaccgtaagttacggtcatatcattaacacttaacgtctcaccattaccagtaatagcactaataaagttgtcttcaacttgccattgcccattatttggccccgcaatataatgggtatcttttgtatagatgatcgccaattttggtcattcataagtaccggcaggtaattcttgattcaattcagccgaagtatacgtagcaccatctttgataacactgccatctatatcttgtacatattgccgtttaccggaatatgtttctgtctttataatattggggaaatttgcatcagctgatagaacccgtatttgtcccaaaataattttcttaatcctataagatttttcaacatattactcatatcggttacttctgatgtatcaaaattacttaaatctagatttgtcaaactgttacaactatcaaacatacaattcatatttgtgacctttgatgtatcaaagtaacttaagtctaaatttgttactttagccgttctaaacatgctatacatattagttatttgtgacgtatctaaacaggtctctccctttatactttgaatgccaaaaaataaattactgcaatcagtcggtaatgttaccttatcagtaaatattaaattagagctttgcggccatggtgcacctgatgtcccagcaatcccaccaccgaaagtataagtgtctgtactattatcataggtccaatctaccgttccccatgttcctgtttcaccttgtactgccttaggttgtatagctgctttagttttcagtgccacaacttgatcagacttcgtagtaacttttgactcaactaaattactgttactactcatagcagttgtttttgaaatagttggtttttcggcagtacttttttcattctcactaactcctgaactctgagtaactgaaacagctttactgttgtcaatattttagctatcagctattggctccgcgctagataccgtactgcttgaacttttactgtcagtggtacttgctgaacttgcaattgtcgatgtggtcttattcctactaccactttcttctttgctagatgccgcattgtttgaactttgactgtctgcgatacttgtcacattagtaatctcttggctaccctcattagtttcattcagattactatcattattttttgtaacactagattttaaagtaaccgtatggaactctgtaccagtgacacttgaatctatactatcattttcaacatccacactatccgcatgaatggaatagttagtgaaaagcacactcaaaccgacagagaaagttgtaatgcctattactacccaagactttccctttttaaccaatttgtaatgtgttttcaattccccgacatagatttttttactcataaaagaacctcctaattcagtaatctttttttattccgtgttatgataagctaaaaaataaaatttcagtcataattgttaagatgcacatatgtgcatcttaacaattaaccctgtacatcatatcatcttgtaatctttaagtgtatatttttacaagtactgttgtaccaagttaatcaatattgtacctgctcaatcaatttttaacatttactctaaaaaggagaactcaatatgaaaagagtaatcttaagtccattaaacctgtcgccaaatgatcaaaaatttatattatctttttctttgctagaacatgacctaatatattttttctcaattcacgactattctcatgctcataagaaaatttcttgcttcattaaaaataattctttgaccgggattagctctgaagtgctaaccaattctttgattggcttaactagcgacttaactgccagtagttatagtaataaattgaattgtattaattttctagagctcagattattatttatcaattatttaaatcagaccgagtgttctacagaaaattttaaaaatacattaaacgacattgttactacctttttttcattcatcgatgaaatcgacaatgccatagacttcaagcatctatcaaaacaagtggctctgactgtttattatgttgattcccatcgttataaaaagttaagccgacaaagcatcttgcaaaatttaaatttaaatgctgtttatacgactaagctatttcaaaaggagcttggcttctctatcaactactacattcaacatgtaaaactcaccgaggccaaacatcttttactacaaacaaatatgtccgtaactgaaattgcacacaaacttcaattttacgataagtcagccttttcaaaagcatttaaaaaaaaatttgctatatctcccagtaaatatcgtgagttaaataaaatagttaaagaccattagccactttcaatttagtattctcattcggtctagttcttgcttatgagaacggactttctgcataaaataaaagtaagcaaataggacgagaaaccgaatttttggtttctcgtcctatttgcttgagtctttgattttttaagctggtccctaatgtcaccagtttcatgatatttaacgccatgacgacaataccggcttctttggtaactttctcaaactacgcaccgagaagagattaaaacgcaaagaagtcttcatcttaccaaaaaccggttcaacatcgatcttgcattgggcataggatctgaccggtttctggaactgaaaacaaggcacgctggttagcctcgaagtattctttcaaatttcgcttgaaatcatacttatcagtccactggcgataggtattgaagttgaatctcacaccttggggattgatgaaatagtcatcctcatgataatcccagttcataactttacgatcgtcactgcgctatttccgactattctctttgaacatcgtcccgtatggtagtattaaggcgatatgctgttcaagttcatcttctaagtaccgataattactttccgaaccgtatccggcatcggcgatgatggtggtacctaacatattgttggccttcaaaggtggaataaatgtcggtaacgttcaggtgtcagttagatgttgaaacaactgctatctagtgataaattgatttctcgtggcgatttgaaagttgtaagcgggtttcaattgaccattttgcatcggatcttccttaactcgcataaaggtggtatcgtggtctgttttagagtagctattacgctgaccatagattgcttgttgggcttgatgttcacgcattttattcaggcgttcgatgagttttcttttcttcaatttaatagtccatcgttgctacttgcccggggttggggacactttcttagttgctaccacggtttcattgaggaccaccaagtggccctcgaccttgctgatcatgacatctaacatttcaagcgttagattcgacccagttgggcttcaccaacaatcttcgcttcatgcaattcacctaacagggcgattaatttttcgtaattcagcttatcaacccgaaccatattctttttccagacaaaactgtatttattcgcattggctaaaattttggtgccatcaataaaagaaacatcatcaatcatgccagtttgacacagatattgggtcatttgcgataaactctcggttgtcaaagtggctagttcatcggaaattctaaagcgacaaatcttgcgataagatggcccttgatcgacaattagccattcagctgacttattttcacaggtaaaacgttcaatcttacaactactgaaggtaccgtaactgtacgctaaaagggaacagttttaacatgggtctagggttatattcccgtggccgtccgaactggtaatcatattttatttttaagccgttggccaactgattaatgtaacgagctggatgactttcttctggtgggcaatctaaagcgataatcaaagcagtttgattcatgttataatagtcttgcatattaggaatgtcctttcggggataatttcgtagagtatcgggtacgaacgatattcttttttatttctatcataacaaaggccggtcaggaataatctgaagattattcctgaccggcctttgttatggagacttatgtcacagtctcttcttactaatagttacttaattttcggattttctgacaattgcagctcataatcttgataattagaatgaactgattaaacctagtaaagatacattccgttaacatatttttcagcattaacatgttctcaaaatttttaagctgtgcttttatttccaagccttcagctatatcataccacccttagtcttgattacgacgcttttttcctcctaagaaagtaagcagactcgtcgttactaatagcaataatccacctaaagtcatggtacgttgcgttgattcatcagtttgcggcaactcgttatgtgaggttgtcgtttgtaatgcactcccagacttcactgatgttacttgactgaaggtcgttagatgatctgattttgctctttgatctgacttagccgattgatttgtctgatctggtgtcactggactaactggcttagctggttgacttggcttgcctggtgttaccggatttgatttcacaatcacagtaattgtggccgtcttggtaacgacgttacccgccgcgtccgtgtaactatacgtaacctcgtaacggcccgccttcgttgggtccactgttccactaacagttatatcactcaatttcaatacgctgccagcttcatcggtcgcactcacaaagttatcggcggctttccaggtagtacttgggcccgctactaacgtgctgtccttggtgtcaatacttgcttgagacgccactactgtgatggtagctgtcttggtaactgcgttacccgccgcgtccgtgtaactatacgtgacctcgtaacggcccgccttcgttgggtccactgttccactaacagttatatcactcaatttcaatgcgctgccagcttcatcggtcgcactcacaaagttatcggcggctttccaggtagtacttgggcccgctactaacgtgctatctttagtgtcaattgacgtttgatcaatgtcatatgttaaataaatatctgtaggttgattattttctccataaattccactaagattattatttgaagaaacataataataacttaccccattttttttaatgagagaagtaggtattatattatagttactcccaacactattagccattgaagtagtttgagcacttaattccgtaccatttttatcaatataatgaatagtgatgtctgaatatatagttgcagaaacagattgagttactgtatttccatcactatcagtaactgtatatataatggtgtaaactccatttttattactattccaagcattaacaaaattggtatcatcttttatagtaacagcggaacttaggtttccatcctcaacatcagatgctgttacgccatccagcaaccatttattaatatcagaaacagtagtaccttgcttaatattcttatccatcgctgttattttaggaacaaaaccactgttattaatattctggaaatatcctgaagtcgtgcttttttgtgcagttgttatataatcagactcatattggtctgtcaaaatatactgactattaaggcccggagtagtagcaactatacctaaaacataccatccaatatccatattatcaggtatcgatatttttacagtttgatcatctatttgagttgttgtccaacctacagatgataatggtacataacttttggaagtattaggaaaaccgcccttttctgttatataaatattgtcagcctgtagggaagcccctgtaccagaaatacttaaagttattgttctacctattttatcgttttgagaattagtataaaagcctggatcaactacaacattaaagttcatagactgcatatctggcaaatagtagttttttccatttatatatcctacataattatcatttataccaatatatccataacttccatttcctataatcaatcgttgattatcatagccactaccaccactaccaccagcattggcctttgtattgtagctggtaccaccagttatcgctactgaagtattatttaaagatgccgtaatgatatttttagaagtatcgacggcagccgtatgcaaattaattatgaagttaattcccgcattagaaatatcagtactgaatgtatatgttattgtcccactggttttatcataagctaagctgccataatttgtaccaccatttaactgaatattgtcccaattaatagatttaggattagatattgtaaaagttaactttgtaccattagatatggttgcacttttttcaatactcgtatttagcgctataacacctcctccaccagagaaagtatccccattattaaaacttgaagtaacaaccactcctgtagtatctgttgaacttgacaaattgtccgttgctaatttaacattgctaacccccgcttttgctgcactaatactggttgcactgttcgctgcactactggttgcactgttcactgcactactggttgcactgttcgctgcactactggttgcactgttcactgcactactggttgcactgttcgctgcactactggttgcactgttcgctgcactactggttgcactgttcactgcactactggttgcactgttcgctgcactactggttgcactgttcgctgcactactggttgcactgttcactgcactactggttgcactgttcgctgcactactggttgcactgttcgctgcactactggttacactgttcgctgcactactggttacactgttcgctgcactactggttacactgttcgctgcactactggttacactgttcgctgcactactggttacactgttcgctgcactactggttgcactgttcgctgtactactcgtatccgcacgtacagaaggattgaccataagcatgcccaaacctaaacttatagataaggttgtaactcccatagctacccatgactttccctttttgaataatttatagcgtgtacaggtattcccaacaaaaatttttttgttcatgtatagacgccccttcactttgtacatattctgtaattataatttattattattgagtgcaataattaattgtgtttattataacaaagcacactttattattaacttaattacataaatcagttgtattcattatattaaaattgtttttatatcgatgaatcttaagacttttcaaagaattctccaaattattttcaggaggcagtctatcgtgagcccctaccatcaacttaccatggatatatttaataattagcagatgataaagataacattgaaaataataggatgaccaatagcaattcataggcattacaaattacttaccatcattgaatcatgagattgaaaaaaatcattcagaacagttcatcaaaactctaaatgaacatctagaaagtgatgatactgtcggtgccattcagaaattcaacatacaagaattaattaaaaatatttctcatcgttttgatcgttaatctttaaatcagattactaactttgaactagaattccatttttgagtatatagtataacctatagccatccatggtattataataactataaataatttatcatatgattgatcaattttattttacagtgcattaccatgtcacaatcaatattatttatcaaaataaaaaggacggtactatgaatttcaaaacacataaccacattaatgctaaaacaacaaaaagatttaaactgtacaagtcaggtaagctgtgacttgttgctggagtgactttttgttcatttgttggtagcgcaatcatcaacgatcaaattgcgcacgctgacacagtaactgtagctaaaacagcaaccacggtcacacggacaaccgtcagtgctgattcaaaaacaagcaatgattctgcttcatcagatacagtttccactacggctaacaaggtcgctaatactgcttcaaatatcgctcaccaaccaaatagtgcaataaccaacttaaatactagtcaagcagcaaccgctacctcaagtacaaccaccaaggctgcttcgagtatcctcagtcaagcggacagcgaaactgccaactcaaacactagtcaagcagtaactgctacctcaagcgctgctaccgaggctgtttcgagtgccgccaaccaaacgggccaaaaagtaagctccagtaataacaaaagccatgaggcaacggctcacacaactagtgctgcctctggttctattaaccaagtaagtagcacagcaatcaaatcagcaacaagtaccgagaataccaacaaggccacatcagttgcttcaaatgcagcaaagcaccaagcaaccacgacaaaaaaagctgaccttaacttaactacggtgacagcaagcactccagaaacggacgtttggactattggagataccaccagaccacgtgttgacgtggtcgacgttgcatcatatcaaagtgcaatgacacaatctgactacaacaaattgaaagcagctggcgtcaaaacagtcatcatcaaaacgaccgaaggcactggttataccaatccagtagccttagctcaagccaagatggctaatgccgccggtctaaatgttgatttctaccactacgcaacatttaatacagccgataccgcccaaatggaagcaactaatatggctaacttcctagttaaaaataacgtttccaaaaaagtattattgtttgccgacatggaagatgccaagacatacacagtaaatgctacagctaaccttaatactttctggtcggtattgaatgcgcttggttatacgaatcatggggtttacacctcaaacacatacttataccgtgatgccgtcattaaaacagttggtcaatcgcgcgtctggcgagctcagtatccatatacgccttctgccaataacctttggaatacagatgacggcgcttggcaattctcaagcaccgccctcttaccatcaggctccgactatactggatatattgacgttagtatctgttataacggtttaaccgaagatagcgcaggtaccaatactttctcaacccccaatgaatttgtaaaccaatatcactgggaaggcaataagctatacttctatggcagcaatggtcaaccaatcactggcttccggcattacgggaataacaaactagaatactatgggtcagatcacgctcaatatcgcaaccgttacttaactgccgccaataaccagttatattactttggtagtaacggcgatgccattaccggcttacgacactatgctaataataaactagaatactatggtacagaccatattcaatatcgcaatcgttatgctactgttggtaacaataagctttattactttgggagtaatggtgacgccatttccggtctgcggcactatggtaataacaagttagaattttacggcacggatcatattcaatatcgtaaccgttactacactgccgctaaaaataagctttattactttgggggcaacggcgatgctattactggcctacgacactatggccacaataaactagaatactatggcaatgatcacgttcaataccgcaaccgttactacaccgccgctaaaaataggctttattactttgggagtaatggtgacgccatttccggtctgcggcactatggtaataacaagttagaattttacggcacggatcacattcaataccgcaatcgttattacactgccgctaaaaataagctttattacttcggggacaacggcgatgccattactggcctacgacactatggtaacaacaagctcgaatactatggtgcagaccatgtccaatatcgcaatcgttatgccaccgtcaataatcagttgtactacttcggcagcaatggtgatgcaataaccggcttgcgtcactacggcaataacaagctcgaatactatggtgcagaccatgtccaatatcgtaatcgctactacactgccgctaaaaataaactttattactttgggggcaacggcgatgccattactggactacggcactatggtaataacaagttagaattttacggcacggatcacattcaatatcgtaaccgttacgtcactgtcggtaaccaccgttattacttcggcagcaatggcgatgctgtatcaactaatcaaccacaaactgaagcagatattatcggttccatgcgtgttgctcaaaaagcgcaacaaatcgtgaccgtcgttcagaatggcggatcaacggcaaccttaaagttatggcaaaaacaaggtaacacttggcgcaaccttttaacttcatcaagtcgtatcggcaatggaggcatcggaaactctcacgaagggaattgactacacaaaagcagcgtctcataatcagtatgagctagcggttgttagggataattacggacagaataatggttctggcttctttatccacgttaagaaccactggccaactgagggctgtgtctcaattaacttaagtgatatgcgcactctagtcagtcacttgggaaccaaagcatacgttgttgatgttcaaaaccaatcacaacttaaaaactactaagatgaaacttggattgcttgcttttaaatggcaatccaacttttttagtaattaaagaacatatgttcttttttgtggtagaataaacgtaaataatcaggaaggtgaggccatgttttttgaccacgaaccacggggtgtctttttttaattgacaataaaagcttctatgctcgctgcgaaaccgttcaacgcggcctaaatccactaaaagtacccttagttgtaatgagcgaagcggaaaatacaaatggcggcttaattttagctacgtagaaaccaagaagttgtttcatttacaagccaacgtttcccgtcagcgagatttgccgcaagatccacgtttaattgttgtaccaccgcgaatgaacctttacattgaacacaacctacaaatcaaccaaatttttgctaaattcacttcagaagctgaagtgtggccctactcgattgatgagggcattcctgatatgactcattcttggcaattatttggctcatcgccacgggccggcttattcaaaatactatcagtcatcaattaagtctctacacgactgtagggattggtgaaattcactatgaaaccgtaccagataagatttggccaattaccgaattaaccgacatttggggaattggtccacgtatggctaaacatttgaatcgcttacaaattcataacatgtacgagcttgttcacaccaatccacactttctaaaacaaaacttaggcgtcattagtagccaaatttttgccacatcctggggtgttgaccactcccagttgactgaaccaatcaaaactaaggaagccagcttaggtaactcacaagtcctaccgcgtgattacttggcacaaggtgagcttgagactgtgatcaaagagattgacgaacaagtcgcggctcgactcagacaccaccataaattagcaggctgcttatctttaagtattgggttctcatacacagcggctgaagctgacggccgtgatgggtttcatcatgctatcagaataggccctactaaatgacaatcagcttctggcccaacaattactctggttgtttcgcaaaaactgggacggccaagcagtacgtaatatcgcggtttacagtaataaactaagccctgacactggacagcaactcgatttattcagtcaacctactcagcaaattagacataaccaactcaatcgagtcattgatgatattcatcaatggcttcactaaactaatttacgctactagcctattacacggcggtacagcaattaatcgtgcttgcttagttggtggccttaatggaggaaatagctatgagtagagatttagatattatccttagtcgtttataattgttattcaaacgcacaacttaaatacgttactggatcgtgattgccaatgacccttatgatccactcgtataacgtcttttttaatagccaacgcgccaatgaacgactgagatcggtaccgttgcataagctaagcaattataccttaaacgacctagaaaacttagttgaagcattgcatcgacaagttaaatttaccattgaatatattggctttactggacttatctggcccagaagtcaaacaataatacaaatgaaacgcaagaatcttgaatgatagaaagtttgatatggacaccgttaaccttttcttcgagcacgattatcacgatcgcggcatgatcaaatggcaaagcttttacctgtctaatcacacagcggcattaaataaactacaagcgcaaaatgcaataagttacctgaccaaagcacagcaatcaatgagtgagattagcagcattctggccatcgctcattttaagaatcagacgattagccttcaactaaatacagttgatcaaaacaaccaacacttgcctaccattacaacatgaatacttggttataatgcaggaactgttattatttcagatcgtcagtttatcaatatgaacaatattcgacatgtagaattaactaaaaatatcgcaaactaatgtcaaagttcaaacgccaatttgagtctcgatgacaatgttagtttgcgctatttatttttcatgtctgtaatacttatacatactacagtgtcatctagtattaccatagtaatttcagctaataatatatgaatcaaaaaaatcccatctcaactttctatattactagtattatggtttgtcaacaccgttaataccagattttgcatactctatttgactgtatttcatatttatcctatttttttataagctaacaacatcactcacttttattttgattacaataattttaatactgaaataaatacactcttaccatgttcacttcttatcccgttccaaaactaagtaccggcgagtaatgtttcctcgccgtaaccatagaaatacttagaatcaggtttaataaacttatactcattagtatgcctatcaaaactaattgagagagactccacctagtttaattcaaaacccattccgttccccaagctccgcaaaccactttgccgacttctttaacgttttagtttgcgtatggctatcattacgaatcaagccgtaacgattatggtaagcatgattccatgaccaacagtcaataccactccaaacgaagtagccctgacaattggagccagccgcaatcccttttgctaaggcagttaggtgttccttcataaaatcgatgcggtagtcatcttgaacgacgccttgtttgtccagaaaccgttcttcaccagcaactcccataccgttttcagagatcatccacggaatgttaccataatttttttgaatattgcgtgcaatatcagtcatcgcctgtgggtaaatttcccagccccgatcaacgttcatcattcgacctggcatatcgtattccttgaagtaaatatcaggcatccacggttgcaaactctttgggctgatatctggtcgctgaacacggaaggggtgatagtaattaacacccaaacagtcaacgggattagcagcgataattgccaattcagttggggtcgcatcccatagtaccccatccattgtcagtcgcttgaccaacttttctggaaaatgtcctaacaccgctggatctaagaagaggttattggaccacaactcagcaaattccgcagccgctaaatcagctggatcatctgacgcggcatacgctggcgtcaaattcaaaataatcccaatctgttgttccggtcgcacgcaaagttcatgaaaccgagcaaccgttttagcggatgccaaattcatgttataggcgacctgtactgctttagggccattaatcacctgtggataatgccagccatacaaatattgaccatcaacaacgactttaggttcattgaatgtataccaatggtcgacccgatccccaaataacttaaagcactgttcagcaaacttaacaaataattcaaccacgtgcttggactcccatccatgatatttatcatagagtgccaccggtaagtcaaagtggtgcaaattaatatacggtgtaatgtggtgagtcaacatcgaatcaatcacgtgattatagaaggcgacaccatcagcatttaagcttgccgtttcaaagtcatcaattagccgtgtccattggattgatgtccgcaaaccttgaacccccgcctgcgccataagtgcaaggtcatgatcataatcattataaaagttcgacgccgtatctggtccaacaccggcatcgaattgttccggctccgttgcgaaccaataatcgaaaacattctgatgctgtttatgaaagttaccttctgtctgggggcccgacgttgccgccccccagacaaagccttccggaaactctaccatagtcacgcctcctaacggttttgggattgttcaaaatcaactgcagcaccccgcaagttcgcttcatcggtatactgacaagtcactaacgttggctttaacgtggcaatcttgacctgctgataaatagcggttaaagctcgttgaatacccggaatcaggtcagaattgtttgagacaccaccacccagaataattttttctggatcaaaactatactgaatattaaagataccttgtgctagcgccgcgtacattgtgtcaatctcgtgacgcgccactccatcgccagtatctgctaactggtacaactgctgaccagtcattttgccagtttgattcgttacttgctgataccggtgaattgcattcggtaccgttcctaattcgctcagcgttcctgtggtattgatttttgtgtaaccaaattcaccaccaaacaggtgcgcaccgtgccagatctgctgattgaaaatcaatgcaccgccaacgccggtcccaatgactagaaatgctaggctcgtagcaccttgtccggcacccgtcgatgcttccgccagtgcggcacaattcgcatcattttcaatgctaactggcaacttaaaacgagccgttaattctgcttgaatcgggaaattatggatgtacggaattgcactcgcaccctcaattacaccagtcgcttgattaactgccccaggagaactgatcccgaccccaacaatcgccgcttgggccttcatttgttccacttcacgctgcaatagatccatgaacgctgccttagtcgtcggggtagtgaccgcatggtgccgagttagtgtcgaatcttgccaaacggcgaatttgatcgtcgtgccaccaatatcgattaatcccaatggtgccattatgctcgccccgcttccgtcaataataacgttttaatctccattggcattaaggtatccgtcgtcacttctggtaattcttcttcaaagaagttgactgcttgctttgataaactggttgtcaccttcaatggtacttgacgatcactcaaattatagccacgtactgtcaatccagtactattgttcgcgcgttttaagctcgtcacggcaaattcaggtgtcgcgagcgtcaagtattgatcgtccgcttccaaggtaccggtatgttgccacgtctgttggttactaaacggcgtttgcattccttgcgcccgttggtaactcgcaatccgttgtgcttccgacccatcggttaactccaaactataattaaaggtgaacgccccttggcattgcgcctctggggttgcaaagtagccccaatcccccatttcacccacacaacgtaacatcgtcagcgcaatagtattatctgctggcaaaatctcgtactcgtttaagcccaaattaccgactgtcacaccattagcctcgttaaagacacaggcaaaggcctgttggtgttgcgggttagttgggttttgccagttcttagctggtcggttcgcacgggttacggtctcgtagatcgaatcagcaacgtgggtttcggcagtcagtgccgtcttgaatagcacccgtaatcggtgatcttttgcttggttattgacatgtgattcaaattgtatttgccgactattaggattcagacgaatcttcgtcgttatcgtcagtggcactttttgagttgatcgctgtgctgttcgctgcgtgatatccacaatggcatgggtctccttagcaagttgttcatccgcggatgttggaacctccaaataattgattaattccaactcgctgcccaactcgtctgcatgcacaacccgcacctccattggaaaatcagttgagtaataggcgcgcttatcagctgtttgacgatagatatattcgttacccatatcacccgtatcttcaaacacaagcatctgatggtaggtcttattggtctcccgatttgtaatcgttaaactaccatcatcttccacaccaattttcaaccattcattactgattaatcgtggttgggccttgaccgttgcatttggcactagcgtttgtgtggctggttgtaaagctaacgtccgccaagcaaatgctggcatattgaccacgttcaactcgattgtgagttcaattgcttggaatgggtcccggaaccgatcttttggtaaatcataatggaaggccacttgttgatcgattagtcgaaagggcacactttgaccatgggcatcaactaccattaattctggtaattcagctaatcgctgttcaagttggtggcgttgctcctgaatggtacccgttgcgctaaaagcaatccggtcccactctacaacaattcttgtcagaccagtcttggtaaagccagtcgtattaacaacgacaaacggtttcgcttgttcattaaaatctgtcgtattgattttagcagtcagcgttgtcagtgcatcgtgggcaacaaatcgtgcgacttcttgtgattttgcaaaccgggttaacatctcgcggtgaacttcatcgacagagcaaccacaaatactatcatggggatgattttgcaataacaatttccacgcatagcgtaaccgatcgtgcggatagtccgcggccggataagccatcgctgccagtggctccgcttgattttctagtaaccgttcgttcttcgtattttcctgcttcaagtacacccgactggaggccgtatttgctaaggtgtaccaaccatccgtttcttgactcgttaattcgccatgaattgtacttaaatctttaggcaaatctgcgctcagagtcgctaggtaatcagtaaagttagaatgaataaattcataatcagggtatagttcatttgcgaccttaattgccgccgtcacgtccaattgaacaggttggtgatcgacaccattcatcattaataaattatccgttgatgcaaatttttcagcatccgcgagcttttgatcccaaaacttcttagcagccgttcgctcaaccggaatctcattgccgttgctataccaattagcaaatagcagccctagaatgcgagtgccatccggaccttgccaccacatttcagaatattgagatgcatagtctgcatctccaacctgattattaaaaccagtcggcgtcacgccacgaccaaaggcagctgtcttcaaattggctagcgtcatcatttgtggcgtttgtcccatgttaccaaacgtatcaggaaaataccccaaaggaacttcttgaccatattcacgcgcttgatcgcggccaataatcatgtttcgaacattggattcaggactaatcagaaaatcatcttgcagaatataaaatggtccgattcgtaattttccagccttgattgccgctgctaattcaggtttacgttctggtcgtaccgctaaataatcatccagcgcaatcatctgaccgtccaaatgaaaactgtcgaaatctgagtcatttttaaaaacatccagcaaattatcaatcagcgtcactaagcgcatatggtgttgttcaaacggcatataccattcacgatcccagtggctgtgtgaaataacaaagaccttcttcttcgtcatgtttacctacctctcaatcttaaatcccagtgtcgttaacaataattcgcaatacatcatattggcccaagagaaccattcacgggtaaactgtgtgtcgtcatcgacatcgaacgattcatgcattaaatcagtgtttcctgtcgttttaatcaacgtttgtaacgcggccaattgttgttcgtgactattggcggttaatccttccatcgcaattgcaatcggccaaatataccgagctggagtgtgggggctaccttgtccagctgctagtttaccgctgtagtaatacgggttttccgggctcaataacgtctgtcgggttcgttgataatttaagtccaataagtcacaataccccaggtaaggagcactcaataggctaggaacattgccatcatccattaactttgcatgtcccaagccgtcaacttcgtatgcgtagactttctcaccattagcattagtcgtataaccatacgtctcaataccattacgcacagtcgtctggagtcgttgagctcgcgccacaatttctggatcatccagaatgctactgaatatcgtctgtaaataaccaaggattacgaccgcaaacatattggcaggcaccagatacccatactcacaagcatcatcgctaggacgaaagccggaccaaatcattcccgtatctgcaaccggcgtgccccgcccatcgcgaaccagtgtgtcctcagggcgatcaatcgttcgaataaaccgatacggcgatgttgcatggtgttgttcaacttcaaatgttgttaatagctttttgacaccggttacaaaattattatcaaattgcgcggtgacgccggtattcttatagagcaagtatgccaactgcaccggataacataacgaatcgatttcgaatttacgttcccaaatccacggccccatattagtttgatcactttgatgaccgtgaccattcgccgtttcattgaaggcattagcatagggatcaatcgccatattaaagaattgccgctgaacaactctagtgatcaggtcagcaatggctggttgctcatgtgctaatgccaagtatggccgcacctgtgctgttgaatcacgttgccacatggctggaatgtcaccagtcaagataaaggcgtaaccttgctcatcgtcagaaatggtagtttcaagcgtatttaggaatgttttttgaaatactgtacctaatttgggatcaagtggttggctcaactgattaaccttagcaacaaactgttggacatgctgatctacatagttagtcgtcattattgcactccttatttgatatatcattttcaccaattataacattcaataccggtttgtctatatcaaattacaactaattcttccctttttcgttcaaaaatgatatatttacactaaactcaattgaccggaaaggatctttcgatgccgaaatcagaaccgcgctatttaaccatttataatcaattaaaaagccaaattacctctggaactttaaccgataatgaacaattaccaaccgaacttcagttagctaaagcttacaacgtcagtcgaatcacctctaagcgagccctcactgaactagaaagtcaggggctaatttaccgtaaacaaggtagcggtagtttcgtgcaaccgaccgaacagccaaagactaacaagcagctactacttgtcctgccgtttccaaccgatgctggtctaggcgactatgcttccggcgtgagtttagccgctagtgaacatcactatcaagctgttactatggattccgcgagtttctttaatctctcagccaaggagatccacgaaaattacgccggagtcatttatttaccacaggatttgtatcaagaagctgagcgcatttatcaactcaaattggcacaggttccagtcgttatcttggataagacattacctgcgcttgagttgccagtcgttaccgctgataacttcagtggcggccaaattgcaactgatcatctactccaacttggacatcaacagatcttgttctatgcacaacgtaataacacagtcctgccaagttccgtctatgaacgctactttggttatttgacagccctcaatcagcaacacgttacgccggtcactgcgcttgcagatttacccactctaaaccaattcagcactaatgactggttgacttatcttgcagaccatcagatcaccgcaatcgttgttgaaaacgatctgactgcaatcaagctgatgaacactttacgtaaagttgatcctaaaatctggcagcggctttcaattgttggcttcgataatattcaagccgctagcctgacgtacccttcattgacgaccgttgcacaagattttaaagggatggggactaaagcagtgtccttgctgttgaagactccggttcagccaactactgtccgcttgccagttcaattaattcaacgtgactctactcaaccattccaaccaatttctaaggagaaataacgatcatgaaaattgaccaaattgatattcgtcaaggcaccgccaacagtccccaacactctcatggcaactgtttaccatacagcggcgtgccctttgggatgaattactttgccgttcagactaacggcgctaacggcgcctggttcttccaaccagatacaccgcgatttgaaggaattcgcctaactcaccaacccagtccctggattggcgactattgccacttattactcatgggcgtccaatggcaggatgcaactaagcggccagactttgtcggaaactaccggccaaacgaagcaaccttcaatgcgcaccatctagcgatttacgacgatcactttaacgttcaaactgacttggcaccatcaacgtatggggccattgctcgctatgacttccagcagttagagctagctcatcacggcctcatgttgcaattttccgatcacgtaacctttgaatttaccccaacgggcgtcaaattatctgtcagcgactaccatggtggcgaagatcctaacctaactatgtacgttgaattaacgatttcaggctttgaccgtgctaattctggctattacgacgaccaaaatcattggtttgtaacaactgaaggtcatggtcatgccctaacactacttttagctagtgaccagtccctaatcaactgtcaccttgccacatcctacgttgatcgcacgcaagcccagcttaacttaaaacgactccaagacgccgatttgacggctcttgaaaatgtaagcgctgcacaatggaacgattatttaagccgagtaactattcgcgatcatcaccctgagcttattcaaacgttctatacttgcatgtaccgactgttcttattcccacaacgtttttatgaattggacgccaagaacaagccgatccactacgatacaaagtctaaaaccattaaatcaggtctactctatacgaataacggcttctgggatacttcaaaaaccgtttacgccctattctctatcttagcgccagaactcttacctaagtttttggcaggcttcttaacaagctacaatgagactggtttcttaccacgttggttggcgccagatgagcggggaatgatgcccggtaatctagttgactcaattattgctgaaagtgctaagaaaggtatcgcattagagctcatgcctcgtttactggctgcaatgcgtgatagcgattcaaaaccagctaaaaattcccgttatggtcggcaaggcagtgctgattacgatcgtttaggctacatccccgcagacaagtatcctgaaagtgtcaattggacccaagactatgcctatagtgattattgcattggacaagtcgctgacgtattggatcagacagatattgccaacaagtactggcaactatccaagcgttatctcaacttacttgatccgcagactggctttttgcgtcccaagaatagcgatggccgattcaaagaaccctttgtccctgacagctgggggagtgactacacggaaggcagcgcctggcaaaatagttacagtgcctttcacgatattaacggcttaatgactgccatgggaggtcccaagcggttcgatgatcagttgacagcgctctgtaatacgcgccctagttatcacgttggtggctatcagatggtcattcacgaaatgagtgaaatggctgccgtcgattatggtcaggtcgctatctcgaaccagcctagctttcatttaccatatctctttagttacacggggcaccgtgaaaaaactcaagtactcgtaaagcagctccggaagttattcaatgcttccactaccgggttcccaggagatgaagataacggctccatggccggctggttcatcttcgcatgtttaggattctacccagtttgtccagctgatgcggaatacgtgctcggaattccggcttttgaccacgttacactgcacacggccgatcatgatatccaattaactaccactaacaatcacgatcacaataattttgtgcaaactatgacgctcaacggccaccactacgaccaagccacgattagccatcaacagctactaaatgcaaccaatattgacgtccgcttagggcttgttcctgctagtgttacgaacaaataaaacaataatccgctattaaagatcacctccgttggttataaattgctagtgccactttaagacctagcacaacctatcgaggtgattttttctatgtttcattaatacagctattgttaaattaacctaataacagcaaaaaagcgtgatcaagttgtcttgatcacgcttcaaaaatattacttgcctgctatagcgttgaaatctatgggatatcttagcatcgcaataccgagcactgcttctttagtgcgacttacctgtttcttcctcttcatccaacataatggagttctgtgtttctttatcgaagaagtgcgctttgttaatatcaaagcccatctgcacttttgcaccgggttgatgaaaatcacgagaatcaacattagccacaaactcagtattaccaacttgactatagagctggctagtagcacctaataattcagacacgttaattgtggcttcaactgtcgaatttggccacgtatcaatgaagatctcttcagtatgaatatcttccggtcgaattccgaagacgatatccttgccattataaccacgtttatctaaaactttagccatcccttcaggaattgttagttgtacgcccttatggtcatcaataacctgatcttgataatgaacattgaagaagttcatagcaggtgagccaataaagccagcaacaaacatattccgtggacgatcataaatttctgaaggtgttccaatctgttgaatctcaccaactgacatgacaaccacccgatcagccatggtcattgcttcagtttgatcatgggtcacatagattgtcgtcgtgctaagccgctgatgtaacttggcaatttcggcccgcatcgatacccgtaacttggcatccaagttagataatggctcatccattaaaaagatcggtgcatcccgtacaatcgcccggcctagggcaacccgttgtcgttgcccaccagataaatcagctggcttacggtccaaaaattcagttagtcctaaaatttcagcagcttggtcaactcgcttggcaatatcatcttttttatacttacgtagcttcaacccaaacgccatattacccgcaacggtcatgtgtgggtataacgcatagttttggaaaaccatcgcaatgtcacggtctttcggcgagatatcattcatcaccttaccgccaatttctaacgttccttgcgtaatatcttccaatccggcaatcatccgtaatgttgtcgacttaccacagccggaaggtccaacaaagacaataaattccttgtccttaatatgaagatcgaagtcattcactgagttagtttctgcatttggataacgtttataaatatgatctaaattaatttcaaccatgataaatcccaacctttctgacactattaattgtattggaaagcgtcttcattatgaatgggcaggttattcaaaaagttcgcttttattcggcaattttaccaaaagttcctatgagcaccatttcaagtggaacaacacttaattgtcgaattcaaaaaaaacaccaagttgatatatcaacttggtgccgacttatatgaacccacacgccttaccggtttttctcacctggtattaccatattaatctaataaggaagcggctaacgcaaagtcgcccacggttgcggacgcattatctgcaaagtgactgtgtacgattaagtcggttgggacttgcacgtaaccattgtttagctgatcaaagtactggcgaaccttgaccatatcggcgtcgttaatcactgaaccaccaaagatgattttttctggcgtcaagttaacatatgcattaaaggccatttgagcagcgtaatagtcaatgtaatcaaatacaggattgtcccgctgaaggttctccccgcgctcaccggtccgtgcctcaatggtcggtccagctgctaccccttcaaaacactgattaccgtggaatgggcaactcccaacaaaatcatcatctggatgcaacattaccggcgcatgccccatttccagatgcgagtaacccccaataaagttgccgtcctgaatcgcaccaccgccaataccagtgccaatcgtgaaataaaccgctgcatcaacggcttgagcctcaccagcaatgtattcaccatagattgacgcattaacatccgtcgtaaagtaaatcggcacgtgtagcgctgccgttagaatccctacaatattagtccccgcccagcctggttttggcgttgctagaatatgaccataatcggcagtgccgtgcttaattccaattggcccaaatgaccctaatccaatggcatcaactggattagccttaaaaaagtcaatacaagccgccaatgtctcttcaggggttaaagttggaattcgcttctttgcgcccatttgataagtctcatccgctactgctaagataaacttagtaccgcccgcttcaatgctccctaatcttctactcattcttttcaccttcactatttcttattaagattaatgtactcaatcgctacaattggttacgcgtacacttatcaaaaccaacttgttaaagttgattaactactcaggacacccgcctttcggtaatcaccaggcgacatccccgtttgttttttgaataatttataaaaataactagaattttgataaccaaccgcctcagcaatttgaccaatatccagatctgaatctcgtaataaatccaccgcgacatcaacacgataatcattgagaaattgggcaaaactacgtccaacttcctgcttgaacaattgacccagatacaccgcattgagatgcaattcactcgctactgccgctaacgaaagttgttctggatatcgctttttaataatctggcgcattgccagcacatttcttgaaaactgttgagtaccctgttcagtagcaagttcagcaacccactgtaactgacctttaagatcactaacgtctttggcgtgattgattgcggcaatgatggctgctttatcatcaaatttcgtcagtcggtcacttagaaccagcaatacaactagtgcgaactgtcgtgctaacaagtccgacgcatttgcctgcttcattgcgtcaaattggtgggttaaccatattgaaaatccagtcaaatcgatgccatccagtgcttttttgacctcagaataacttggcaacgtcgatgaaacgctctcttgcgtatctggcagcatcattcgcagccctgaagcagtttcaaaaaagtattgtcttgcaatctcacgacgcaattgaatataacgcgttcgcaattgtccgacattcttaattggagctccaattagaaatggccgatgtgctaccccgatctgatgaggtgcttcattgataaatatgtttaattggtcagtcgtcccttgaaagacaataataaaatcttcccgctcagtataaaagcccttgaccgcttttatcacacgtaggtaattcactaaatctttaggcggtaaggggtttagtaccccaataaggcgaacggttgttggtgtggcaaactcaattcctagcgcctggataatttgcagttgctctggctcgcgatcagtcgtcagtaatgtccgtgtctgtgtctgaattgccagcgatgcaatctgatgttgctgttgttgtgcttgtaaccggtccaaggcacctcgcagtgttgccaacaattcatcagtatcaattggcttacgtaaataatttacagcattttgctgcaagccagcacgtacatagtcaaaatctgaatatcctgagattacgatcaattccattgctggttgaatcttcttggcagccgctacaaattctgggcccggcatctccggcatgttcatatctgaaattaaaatatcaatgtcattatcttgtaaatactttaacgctaagctgggattttgctccgtattcacaatctccaaccccaatgattcccaatcaattagtaatttaagcccacgtaatagcatgtattcatcatcaactaacatcactttccgcatcacttaaccccctcacgatcatcaaactgcagcaataccgtaacgccctgttggtcattactattaattgtcattttaaaaccgtccccaaaactatcgtgcatccgtgagtagacattctgtagtccaattgaatgctgttgttcagctgctaatggttgcttcaacttttgattcacagctttaacagcttccggtgacaggccgcggccattatccacgatcttaacgtgaacgataccagcttcacgccaagcctttaaacttagggcattatccacccgtgagaagttgacaccgtgcacgaagtaattctcgacaagtggttgcaaactaaatttgggaatctcaaccgcagcgacatcgtcagcgaccgtaaattggtaagctagccgatcaggaaaccgaacttgatataaaaagacatacttttcaataaaactaacttcctgcttcagtgtcgtccgtgatgatagatccgtgttatttcgcaataatgcagcaaagctatacactacattggcgagttctggctgatgtgcttctaacgcagccattcgaatatactctaatgtattagacataaaatgcgggttgatttgtgcctgtaatgctcgccggttcgcctcttgttgggcgatctgtaattgatagatcgtataaatatgctgatgaatttccgtcaacatagcgttaattccgccggcaagtgtatgcaagtctgtcggtcgcagattcattggaactcgtgcatctagattaccatcagaaaccgtttgaacagtatcaacaattgtattcagttggtgctggtaccgacgaaaagtcagccacaagcccgtacttagccctagtaacaaaatcaaccctaataaaattaacggtagaacatgtccgataatcagacgacttaatagatgcctattcaagactgtcatcaccgtataaccggatgataattgtttcgtggtaacatgataatcacgcaacattttcatgttgcccgccgttagtgcctggttcagatcacgttgctgttgtcgcgtgacccgtttaccagcaaagtaaaagacttcatcatcagcctctgaacgtaccacaacttgcaagggctgggtcgcattcacttgtgacaactgccgcttgatctcgctctgatcaaagctgatactgagaaccccatccgtttctaaggatgtctgattgattaacggagcattaattgcaaaacgttgtttaacgtctttggccggatataaggcgccaccaggattagcttgtgtcgcaacaaacaccttattttgactcaataatcgtagtgtcagttgagttacttgatcatgctgagtaaagaattgccgtgactcagttggccagaaaaagtatggactgccactaatacttttatcaatcgtataattgctgtaatcagtgatagacgaatcaaaatatttttcgatactcggtaaattactcgatgaacttgtcatttgagtcgcgaattgcgcggcaatttgttgattctgattaagcatttgaccaacctgcacgatggccgtattctcggcctgctccaaatccgcatcataagttcgaatactaacggtgataaagacggttgttgccaaaacaaccatcaccgaaatgatggttgtatataacttaatcaggtgggcaaagctcgcctgcatagcatgacttttcagcaacatctaaactgcccctagcatcttatcaatcttgtcataccaccgtcgtgacaatcgatctgccccaaccatatagattccaggacttaggaaaaggatcatccctggccacttcaaagagatgacgatcaatacgatcgtgccaataataaaggtcaataactgcgtaaaattactaaagaactgaacaattgctaatttaatggcatctttgaaggcaacatcgtagcgcgaccgcaacatcacggtaaaaattgctaagctaaaatcaagaatcaaagcaaatacgataataaattgaatgaaaattatccatagtgtatgaatcgaaaggcttaaatataaattataagccaagacggcccctacccctaagaacaaccaagtatgcaagttcatttgccaaaaatggcgtttaaagcgctgccatccttccttaaagtgatataaccgataatcccactgcttatccatatgcatctcagttacagttcgaaacgccggtccaattcctagtacaaccaacccagcgactgtataaatccaaaaatagacggtcattattaagaaaataaatacccgtgtaaaaatcttatccgctgcgcgtccaatcattactgtctcctccttttcataatctatctgtatagtatcaaaatccattcattgataatagcgtttccacttctagcttaatgcaaggataaacgcttcatacggtcgtaataccacccgccccagttgctcaggataatcttgatagttactgataatcaactcagatgctcgctttggtagatctaccgtaataagtgtatcagcaaaattagcgcaaattagccattgggtttgttgccaattccgagtgtaggcaacgattggtgccggtaccgctgataactcggtaaactcaccctgttgcaacaccgccgactgtttgcgtaatctaattagccgctgatacgtccaccatatcgattggtggtccgcttgggcggccgcaacattgatcctcggataattggcattgattgccaaccatggtttgcccgttgtaaatcccgcgtgttgcttagccgtccattgcatgggcgtccgcgcattatcacgattaaagatattgattttctgcatggcggtaccagcatcatcaccctgtgctcgtaattgtcgataaattgtccgggcttcaacatcgttaacttgatcgatagttgcaactgggcaatcagtcataccaatctcttccccttgatagacaaaaggtgtgccttttagtccgtgtaaagcaatggctaacatcttcgcactcagctctcggtactgacccgtagccccaaagcgtgaaacggcgcggggcaggtcatggttactccagaataaactattccacccgtgagtcgccatcgtcgtttggcaagcatagagcgcttgtttcagttgtgcaacatcaagtggtcgctgttcccacttttcgccgccaacctggcgatcagcccataagtggccgaattggaagaccatacttaattcttcgcgctgctcatcactgtactgtcgcgcatcttctggacttgcactccaggcttcaccgactgttaaaaaatcacggttccgccaagtctgacgattcatttcatgtaaatattcatgcagatgcggcccgttcactaaaatttttgcacgtggctccttggcaatcatatctatgacatccatccgaaacccttcgattcccttatcgatccagaaattcatcatacgataaattgcgcgtcgtaagtctggattctgccaattcaaatcaatctgcttttttgaaaacaagtgcaaaaagtattggcccgttagttcatctagctcccaagctgaaccgccgctgaaaccagatgtcagattattaggtgcatgcccatcaacagcatccgcccatacataataatcgcgcgtcggactatctggattctgacaagcatccacaaaccacggatgctcatcactggtatgattcacgaccaaatccatcacgatttttatgccacgctgagccgcttgagcgatcaactgatccatatcggccatcgtgccatatgctgggtcaatcgcctgataatccgcaatgtcatagccgttatcagcattcggacttttgtataccgggcttaaccacagcgcatccacaccaagggttgccaagtaatcgagccgactgataatcccagggatgtcaccaattccatccccgttactatcttgaaagctacgtgggtaaatctgataaaccgttgcgcgttgccaccaatgtgcttgcatgctactgaccccctactattcttaattatggcccaatttgtatgtagacaaagaggtcgtagtgcccagcacccgacctctttgtggtaaatgatttaagtgttactgtttagctaagaaggcgtcgtattgtttctgtaattctttttgaactttatcgtaaccagcggctttgagctctttgtccatcttcttaattgttgggactgggtcggcagtaccagtatttaagatatcaagatacttactcattacgttcgataagttcgtaatctcggtcttcaatgaactcgtatcaggattgaaaccaagtgctgcagaagtcttcgcatccttaatagattgatcacgcttcttaatcatcgcttcagtcgttgagtcttgagtataaaggttcttgttattacccatcatccaagcaccaatgaatgtgttaggcttgtacttattggttatcttgatcttacccttagccttgtccgtaaagttccattgagttccttcaagaccccaagtaatgttgttaagcaaggtcttatccgtgttcaacaggttcaagacttgcatcgcttctttcttatgcttggaagtcttggaaattgtccatacagccacttgggattgagcagatgacttataaggatctgtaatggccttagacttcatcttcttaccgcccgcattcgtaatcaaagcggaatcgccgtaatcgaatggtccttgggtttcttgacgtacgaaccaagtgttatcttgtaagttatattgtgtgctagacgttgcagcatccttaggaatataacccttttggtaatagctgtgcaaagtcttcaggattccttgcatttcactagtatcgtagacattcacaatcttcttacttgaaccactagagtcaatggcaaatggtagcccattacccaatgggaagtccatgtgttttggtgatgccttgaacccttgaccgattgcaaaggctgccactcctggtttttctttatggaatttcgctaaagctgactccatgcttgcgtatgaatcaacatcattaatactaatattgtacttcttcaagaattcatcgttgaatgtcagcatattctgcgcgtaaatgttggcattgactgggaagccatatgttttaccgttaacctttagccctttccagtaggctgaatcaacttgtttgtacgctttgttggccacaccaccactctttaattcgctattcatatcggcgtatgcacccttaagtgcatttgacgtatagttttgcgcaaaggccaaatcgtaaccgctaccagaagtaaccataacattgtacttctgttcataatcgccccagccgataaagttcatctttaaattgatattcttgtaagtcttatgaatttctttattcgcccgtttaatcattgcgtcatagttcttcggcttatcaccaggcatatacatattaacggttgttgccttactggatgctgaatcgctattggacttaccacaaccagctagtgccactgttccaaatgctacggcactaactagggccgcaccctttacaaatttattcatagctgttcttccccctcggaaaagttttttgaaatgacttattaataccccgaacagttaaaacgaattaaatacgcaacactaccaaactaacctttgacgccaccaatcgtcattcctttgacgaagtacttctggaagaatgggtaggttaatgcaattggtaaagttgcaacaacaacgattgcgaaccgcataccttcacttggaacattggcggcacccgcaattgcgccattggcttgcatattttgtgtcataaactgaatattgttttgaatcttgatgagtaaatattgcaatggtgtgacgctatccttgttaatgtatagcaaggcattcatccaatcattccaataacctagtgacgtgaataaactaattgttgcaatccctggaattgccagaggtaccacgatactccggaaaatccgcaactcactaccaccatcgatccgtgccgattcaatgattgcttccggaatggatgtcttgaagaaagtccgcatgatcaaaacgttatacaccccaaagctcatcggtaagattaacgcccagatattatcctgtagacctagcatttgagtcacaaccaagtaagttggcaccatacctggaacaaacagcatagaaatcaaagcgaaaatggtgaaaaatctagcataggcaaaatccttacgagaaattgcatacgcgtacgtcgaactaaacaaactgttcattatggtcccaacaactgttacaaagatcgtaacacctaatgagactaacacttgatgacccattttagcgagatactgatagctcgcaaaggtccaatgtttaggccagaattgatacccatacgtcgtaatatctgattcttgtgtcaacgataagataatgatgaagaagaacggtaagatacacgatagtgcaaagattgctaggaagatgttgaaaaacaggttggcgccaggtccgaacttgcgaatctcaacagctgaaatatgttttttcttacgcaatgacggcaccccctaaaataatgctgattctggttgtttacgccgaaccacccaattacaaacaatgattaacagtgcaccgacaactgattgcattagcccagcagccgttgacatcccaatatcattagtcgtcgtcagcgcgcggtaaatatacgtatcaaaggtctgtgtcacattaatcaacgtccctgatgaacgcggaattaggtagaatagcccgaaatcgctacggaagatccccccaatattcaagatcaacattaacgttgcaactggtaggatgtgtggtaacgtcacgtttttaatctgttgccatttatttgcaccatccatcatcgccgcatcatagtacgatggatcaattcccatggccgtggcaaagtacagaatactgttgtatccaattcctttccaaacccctaggaagataatgataaatggccagacccacggcgtattgtagaagtcaatcggcgtcccgccaaatgactgaataatatggttcaaaatacccttatccgaactcaagaaggcgtatacgaagtaggccaagattgcccatgataagaaatatggaaatagcattgaagtctgataagctttcaaaagtcgttggttgcgcatttgactcatgacaatgccaaagaagatggcaaagaaaaagttcaacagtaagaaggttaaattgtacccaaccgtgttacgtaacacgatccaaaaatctgccgatttgaagaaaaaggcaaagttctgaaagccaacccacggactatgcagcacactatagatgaagccttgatccgagtattgaaagttttgaaaggcaacaacgttagccaacacgggaatgtagaagaagataattaataatatcgcacctggagcaaccatgagcaagaatacgcggttgtcccataaacgctggaagaaattgcgcttcttgacgattggaactgcggcattttgtgccatcggttctccctcctttcattattacacctgttatagtaaccgctttctcaaacggcaacaatcaactaacttaagggatatattgacaaactcaagatttcatcaaaattaggtataatttcgacacaaaaatcaacaatctaatcctgttagaatcaacgggccactctgattaaaacgtttattaaacaacctaacaatcgaattaacacgttgttagcataccaacatcagcatatcaagctagtgtcgagcattgtgttagcatccatcccattatcgttatcaaccaaaataaaaacgacaccattttttcggcgtcgttacggttctatctaaaatgacaattcacaggcgctcacaatttctttatacagcccgtgcccgaccaatccgttattgcgcttatccattggtaataacggttctcgcaattcagctaagtcatcacgtcctgctagccattcatcaatacgccaagtaaccgtctcacagcgcgcgatttgaccacctaatcgaacatcgataacctcaaagccatttccacgccgttgttgctgccaaagcgctcgaaaatcgcgtaataattgttccagtgcatgctggcaacttgtcaccgccgctcgagccgagtcagcccgtaatttagttacatcagaatcaacaagggctaccactacctttagagctcgttgttttactaaaaccgtccgtgccaattgcttgtaaaaggtcaccatcaattgattttcttgatggacgtgtacctgatcaagcttcgtcattaagtccagataatgagcttcaacatcaataactgctaagttagaccggtatcgctgcaacattagatcctcataaagaatcaacttgctcacattatcagcatcgacgttaactttactcgtaaagttatcaaattgatctaagagtcgataaaaagtcgcgttttcgccctgtatcatggcatattctgtatcgatcatcgccggtgtgacatcctcgtaatactgataagttgcaaaagcttgtaggccataccacgctgcactaaaaggtacttctgcgccgtcgtcaaaccacattgtcgcaactacttgctgcacgccactcgctttggcagctttcaagcccgcgtcaatcgttgccagcatcttactttgattaggtgccaaagcactccacgtccagattccgcccgcaaacgccacatcatcactaagttcgaagtgttgggtaaagcgctcacgataagtctgttcatcttcatggtaatagtcccaataaacttgaccgactggcggtaaactcgctttaaaggcagggtcaaaatgcacatccggatcatacatttcatgctttgatgaagcgaatgtaaaccataagtcactccacatataagcttttaaacctaatttctgagttaacgatacgactaattgtaactgttgtaagataagtgtttcttgatctgtaaacccattttgatctaaatagcgtccacggccaagctgataggcttcatccatcccaacgtgaatcttattagttgtgaacggggcactcgccgcacgcaaaagattagtgaggaaatcctttgttgcaggtgctcccaccagtaacgtatcgtccgtgtctttgactgccgcatgcgcatcccactttaacgcattatgcagatgtgctaaagtctgaacagctggaacgatcgtcacaccaaaacgatcaccatacaaagcaatctcatgtagttcggtctgctgataacgaccacgaccacgaccaaaatatggtgcctctgggatttcaaacagatcctctaaatatagccataactcattgtaacccatgcttgctagtcgccggatgatttgctttatcattgcaactgttggtacgccattacgagcaacatcgagcatggcagccagcacttcaaatcttggttgctgtcgaatatcaaattgcgttgctttccgggctcgaccacataacaatgccgcaccatgcatcaactctgccgtactgccatatgtgagacgcacctgatcaccattgcgttgaatgtgaataccagttgtcgcatgctggcattcaacactaagatcgcttgtcggcatgattgcggcacaaaccgcctgtactgactgtacttgctcagtagtcaacccttgccacgttatcatttagaaaattcctcctacaagttcattattttttggggtctgacaagatctatttttgcgactgaaatataccataatgggagtacagtaaacagggcagcgcttacatttttgaataaagttgttccgctaactataccaacttcccgtattattggtatttgatcacctttatctctcgattaacgttggggcagcgccaaagtaccgcttgaataccttgctaaaataatacggatcttgataaccgaccgcatgagcaacttggcgtactgtgattgcttcttgcatgagcagttgcttagcacgttgcattcttagccttgtcaaataactaatcggcgtttcgccttgaattgccttaaacgttcgtgacaagtacgccgcactaacatgaagggaggcagccaccgttcctaatgtcagatcttcattgtaatgcacatccaagtaatacgtggcagcattgaccaacgactgctgatctcgactaacattaccttgatgcagttcggtataatcgttactaacactattctctggtaaggatcgcaataaccagcaaagctgttcaatcaccatcgcttgaattaacaaggcgtgcccaaatacggtggggcgctgactttccgctacaattcgttgggcatttgccatgaattctgcccgataatcatcaagactaattaacgcatctttaaagggcaagtggttaggcacctgaccaggtagcgcgatatgccgaaagcctatgtgcagttgaaggctttgggtatgcgggggctgagtctcctgatgatgaatgccagggttaaacagtagtgcctgaccggcaacaactcgacgccattgtccttccacattgtagtctgaatacccttccaacattattgagagctctagaaaatcatgttgatgatagacgtaggttcctggatgttcatttcgaaacggaaaggcgtaaaggacttccggttcaaattcacttaattgcaacattgtgatccctccttacaaaaaaagacattaaactagtcaaaataatctattcaatgatccctccaatatcatcatacttagccttgtcaagttagccagctttagctggttactacgggaggttaatcatgaatccttatcagtgggtctggcaatacgcccggcacagccgctggcaaatcatactagctagtctcttaattaccgtcaatgcacttggtgtagtagcagtaccattattgggtggcatcattgttgacgtggtcatcaatcaacgacatctcaacttgcttctgcctttattagcagggatggtcggtatcacgttaattcgaaccgtgatgcgttactgctacattatcctctgggaacgcgtcggtcaaaattcattgtatgacattcgccatgatttattcacgaaattgcaatccttagattaccccttcttcaactctgtcactaacggcgatattatggctcggttaactggtgatactgatgcaatccgacactttctatgctgggttacctataacaccgccgaatgtgtcctatggttcttaactgccgtgattgtcatgggttggctcaactggcaattaatgctcgcactaattatcctaacacccattatcgcctggttaacgacacgcatgagtaccgaagcacacactgtcttctttgacatccgtcagagcttcgcccacttgaatgccatggttgaagaaaacatttcaggtaatcggatcgtgcgggcctttgcccgtgaagattatgaaatcgagaagttccagcaactcaatcatgattacaaggaaaagaacatggcctccgctgccgtttctaggcggtacctaccgactttagattttcttgcatccttgttatcagtcattgttttactgctcggaagtattctcgtgattaatcaccagatgagcctaggacaactggtttcgtttaacggctttttatggatgctcaaccaaccgatgcgtatgagtggctggttaattaacgatattcagcgcttttcagccgcaactattaaaatccgttcaatgctgaacacgcaaccaacaatcataaccactaaatcacaacaagtggttcctattcgaggcgctgtccagtttcagcacgtcgactttgctttcccagatacacctcaagtcaacgcacttttggatattaattttactgtcgaaccaggacaaacgctcggaatccttggtgaaactggctctggaaaaacaacgttaatgaatctcattgctcgtttttatgatcccacgaacggccgtatcttaattgacggacgcgatattcagcagtggtcggcccaagacttacgaaaccaaattacgattgtaacgcaagatcttttcttgttctcggacaccattaccgacaatattaattacggcaatcacgatgcgtcaataccatttatccgcgagatggcggctatcgctgatgccaataacttcatcgatcagatgcctgacggttatgataccgttgtcggtgaacgaggcgttggtctctcaggtggtcaaaaacaacggatctctctaacccgagcacttgttaaagatcctcgtattttgattctagatgatacgactagcgctctcgatatggagactgaagcaaccattcaacaacgattgaaagcgattacaaaaaataagacagtcttcatcattgcctctcggatttcctcactccgccatgctgatcacatcattgttctacgtcatggtgagattatcgaacaaggcaatcatgaatctttacttgctcagaacggctactatgcagagacttatcgtcggcaactcggactaattaaagatgcgaaaggagatgagtagtgtgaccaagcgaaacacctacaacgaagacgaagaacttaccagccgctttaattggcacgactacgcacgacttggccactatctacgaccttactcgtggcgattgtgctttgtgttaatcactattttaattggcaacatcgccatcatcttgggtccctatttgatgaaaatcgcgatcgacactgcgattcctaaccgtaatcttccattgatctgggcattaagtggcacatttctaatcagcttagtcatcgcattcctgtgttttcgatatcgtatctgggcaatcaccgagattggtcaaagtttactaattgatatgcggactgatctattcacccatttacaagagttaccatttgcttattttgattctcgaccgcatggtaagattctgatccgggtggttaactatatcaatacactaagtgatctactggcaaatggcttagttaacctcatatctgatattatctcagtcctcgtcacgttaatattcatgtttgcaattaactggcaattgacccttgatagtctcgcattgattccagtactagttttatgggcttacctgattcaaaaaaagcagcgtcaagcctttcgcaaactaagcgataaacagtccaatctcaatgcttatatccatgaaagcattgctggaatcaaagtgacgcaaggtttcgcccaggaggccaacgcgatccagacctttgatgcggttgctgatgacaatcggcgtgcctatatgcaagctgtcaaaattcaatacgcgctcggtccaggggtgcaaaacatctcaacaattacaactgcactaatttactttatcggtattcagcaactgggggtcgttgtcagtactgggacgctaattgcctttttagggtacatcaataatttttggaacccagtgattaacatcggtaacttctataattccttaattactgccaccgcatacttggaacgtatcttcgaaactatggatgaaaaaccacagattctcgataccccagacgcctttaacttgccgcccattaagggagacgtccgcttcaacaatgtctcatttcgctatgaagaagccggcccgttgacattacacgacatctcgtttcacgcccaagccggacaaacaatcgctttagttggaccaaccggcgctggcaaaacgacgataattaatctattgtcgcgcttttacaacgtcacaactggcaatattaccatcgataatatcaatttgcagcaagttacactcgattcactgcggcaacagatgggtgtcatgcaacaagaaacattcatcttttcgggcaccataatggataatattcgttacggtcgacttgacgcaacggatgacgaagttcgttcggccgccaaaattgctcgcgcagatgctttcattcaaacattgcccgctggctataatacaacggttcaggagcatggtagcagcttatcagcggggcaacgacaattactcgcctttgcccgggttttgctagccgatccgcgaattcttattttagatgaagccactgccgcaattgacacaaaaactgaaaccttgttacaagaaggacttaatgaattattaaaaggacgaactagttttatcgtcgcacaccgcttatccaccatccaacgagcggatcagatacttgtgatcaatcatggccgcatcgtcgaggccggtcgtcatgatcaactaatggcaatgcacggcgaatactatcgtctctatgactctcagtaccaaatgctccaagatcaaaattgacaatgagtgtaatttaaggactgttttactagcagtccttttttacgtggtaacccattatccttgcccagttaccattcggtcactttctgtaaaaaagtatagtttgtgcacatcttgatatagtttctccctaggaatagaccatgtaagcggttaaaatcaaactatcatgaagtaattagccacaaaaatggtcggtttgactataccaagtggaggtgggcagatggctaaatacgagatcttatttaaacaattgcgactagcaatcttacgtggcgagtatgcgcctaacgatcgattaccaagcgaaaatgcaattgccatcaagcatggtgttagtcgtatcacgtctaagcgggcattgaacgaattggccgctgccgacctcgtttatcgcgttcgtggtgggggaacctttgttaagcctcacaagagtactactcaacggcaaatcttactggtactgccattcccagaaacaacgtcctttggggactatccaagtggcattcaagggacgctagccggtacgacttggcagttaaaattgatggctaacgagcgttttatccagcttaacttagacgaactagcttctcaatacgcaggtattatctattatccacaaaacttagctaccgagctgccaatcttaatgcggctatacgcgcaaaaaatgccactagtcgtccttgataaacaaccggctgcacttgccgttcccagcgttacaagtgataacgtcgctggcggtaaaattgcctgcgaacacttacaaagtcgtggccaccaccgaattgccttcttaccagagacgccattttggcaaacatttactggtactgtcagtgatcgttttttaggctacttcaaccatctaaagctagctactagcgatgccgcattgcctttacgttgggcgcaagccttgcaggcttgtacgacggctgttcaattaaaagcctatatccaagcacagagaatcaccgcaattattgcagaaaacgatgttgtggccctacgcgcgttacagcgacttcaagaacttacttccaatagcgatacctcaattgcactggttggattcgacaatttacccgcagctgcccgaaataatcccgcactaactacggttgtccaagactttgctgcaattggcgctaaagccgtcgaagcactactcgatcaaattaataatcctgaacatctttttgatgatcaaatcgttgttggcgtcaagctgatggtccggtcatccactaatcaatattagtcatatttatttttctagggaggtcatgttgatggaaacgcaacaactattatcaatttatccgcaagccacgatttctcctcgaccctctgtggctaaaaatatggtctgtgtggctattgatgccggcaaatacatttgtattgatactacaaacctgagtaatcgcgagttgtcactactagaattattaacccatactaaatcaaacgcgacaactggcgatgcatggtcagaatttttgacaggccgccacacgaccgccccgcagacgaccgcaaaaaagttacaactactacaatttagagtacgcttcaccgaacgacatgccgaccgttcgcaatggttgagcgctatcgctgacaccttcgaacacgtcttacaccgcgcttttatcaccgctgactctggatatcttttgctaacagagtcattaaccgataccagtgctgacttagccagtcttttagcccttattgacaatgatttttatactaatacccatttattcattggtagcacacataggtcgagccaagacctaccaaccaccttcgctttagaacaacaattattctcacagaatcagcaagacacgattgtcacccttagtagcagtcttttaccctttttagtcaatcagcaccaacctgaactgcaagccttgcgcaatagtctctccctggattccgacaataagcagctaatccgcgcgctttatcatacccagggcaacgtccgccaagcagctagcaagttattcctacatcgtaatactctactctatcgaatcgagaagtttgaacgttgtaacggtttaaatcttaagaatatggatgatcttgtgtattgctatttgctgacattggggcaagttattaatcaagtggagaaatgaatagagtagctgccattagcccatatgattcgattaaaaatacgacattaaataatattagtgaacaccttatcagtataaaagtacaataacatagcgtactttatgtaatcttggactagcatagctaggttaaggctttcatatttctctttcacaaagaacatagtatttcaaactaaaatatctgtcgtcaataatcaagtttcaacttgattacctgacaacagatattttaagatcagaactttattcagctataatccgtaccacgctaccgactttaaaatcaggataatcgccctgctcaacatataacgtcccaggcaatttagcctcctttgcacccgtaaaactaatagccgtatggcctaatcttccaaggttagtctggacttcgccaccaactgctgtaatttgatagacttgattgtcgacttcaagtttcattcctgctgtgatttgctcacttattgggacaacttcgataataaagcaagaaggccgtaatgcgtctggagcttcatcaccaaataatactgccatgccaatcgatttaaaatcagcagattccgcacctatttctaagacctttgttgaaaagataattctctcttttgtcatcatacaatacacctcaaaccttctaaaaatttattttgaatataatccaaaacttgcaatccaagcaataaagacccgcggaacgccgttgataaaccgactatataacactgatggcaccccaacttcaaccgtcttagaatcagcctcagctagtcctaagccaactggaataaagtcacaaccattttgcgtgttaatcgcgaataatgctggtaatgcatactgtggtggaatattacctttcccgatttcaacgccaatcaaggtcccgataacttgaccgataactgcgcctggcccaagcaatggagataagaatggtaatgagcaaataaatcctaaaaccatcaagccccagacattgcctgctaacggctccatgatactggcaaaaaccttaccaattccagagccattaataatcccaataattaatgccacaaatgccataaatggaataatagtattaataactgtttgaacagcatcttttgcggcctgattaaacgtcgaaacgactcgcccagcaccaatcccaatcttagttaagatcccaggattttttgtttgtgctgttagtgtctttgtattatcgaatttcgtatcgtcatctacattctcaaattggttagcgctttcattttgactgtcagaaaattgctcctcctcagatgttaccaacataatctgatcaacatctacattggaaacataattagcttcattcataaattgcgctaagggaccgctcttaccagtcggtaatacgttaattgttttgatacccttcttgggataaattccacaccttaatgtcccaccacagtctacaaccgctaatgctgtttcttcatcaggaattgacgtcttaaagccatcaacagcttccattcctgtcaacttagcaatcttatcaacaattgctggtttattacctccagtgacataaacaaatttatgcttcgtgatagttggtgtaataattagcgggccgccccagccaccagagcctttaacaactttgatactatgatattcctttgccatgatctcgttcctcactctctcaattagccgttaaattcaactttcttggacaaggtaatcccttgttgtttgcaaacataggctgttgtaaagtcagtaatccaaccaccgataaagttcattactaggccgactaatagatatcgaatcgccaaatccattgtattcaatcccaacttctgaaccccttgcgcaatccctaaccaaatgaaatactcggaaggattgatatgtgggaataccccattactagtgtggcaaaattgagcaatcgatgcataccaactaggtttatagtattctggcaagaaccgtcccattgagtgcgccataggattaccgagcataaatgccgaaacaaacggtaaaattaaataacgggttacaggattctttgacgaagctctggccaacttggccatcttcttgtcaccaacaaaggcaataatcgcgttcatcaagactaacagcaatagcacaacaggaataattgatgtcatccatccaattaatgttttaccaccactctgaaacagccccataaagcccgaggccaaatctgtgactactttcatagtattaatgctcctttacgttcacttgtttttttcgcaaacttgctaagcctttataataaatagatttcagcttttcaatcattggtaggctccaaattttgacactaccatcgaaatcttgtggcgttagctgatttgctttgtaatttaaatagttcttataggcatccaatagacaaactcgcgttagcttatcgaattgttttaattgctggtatgaagcagcaatttccgcaatatttttctgccgcagttgatgcaattccctaaactttgcaaaaatcgtaacccccttcatcatttgagcctctaagatcgtgccgtcatcctttatcgctaatagaattagtgtccccgaccgtaattttttaggatttttgccaattgctactggcgctaacactcgtaattgatgaaaggttttagaaaaattcttaatttgtcttagtccaaggaaaccttgtaatagaaacgcactgactaggatcacgccaaaataaattaacattaaatcgcctccatcaactgatttaatccttgattttcatcataatttttcaagttattataaatattgctgttagctgtgatactgcgaattagatcgtatacttgtgctaatattttgcttaatgttgcatctagtttatacggaattgcgaccaaaaaaaccacgtttaccttttgattatcgaatactaccggtttttcaaacactcctactgttacaaggattcgatttagtccagatttatcaataacgtgtggcaatgcaaccccatcaccaaaaatactactcgattgttgctctcgattaagccaagcttgcataaaatctggtgtcagttgaccatgttgtatctcttgattaattaattttttcactccagtgacgtaggtctcctgttcatcaaactgcgtgacatcaaatcgacactgcccctgattaacagcttcatcaaccaacgaaatttgaagacgttcacgtaacgttccttgattaaaaatagaattcaaccgaataataggcgcgtggttaattaattcattatctgttaaaaaactgttagaaaaaatcagtaaatatttttctggactctgctcccattcactaattgagttaaaaacatcaatctgcaaatcatcatctaacatttctttcaatttctcggaaataaactttttcatactagtattaatgggctcaactagtgcaacccgatgaataattggcgctgccatgtattcttcaagctccatctgaaaatagactgttaaataaccaacctcctgggaacgaatccgaatattcaatttagtggcaatggttgataatgttaattgcgctaactccgttgaaactggatacttacttaacatgtctaccgagataaatccttctgacttgacatcaaaaatagcccgattaatgagaaataataaatgatatcgcaactccatcaacagccgtttaaagtccaaattcacatctaatttttgcttaaggattggaaaaaccgactgcattaaatcctcaacttcgaccaatcccacttgaactaactgattatcatccttcggtagctttctaatgtttaatgggtatgaaataaactcccattcgctagtgcttaacgagctaccaattatctcagtaactagattccgcaagcacgccatcgttacatcactaagaagtggatgatagttattaatacgatcattgatttgaatgttatatttacgtaaccaattaataactgcaatatttcttttaaccatggtcacagtatcattattatgatcaagttttttaacaagattaagcaatttgacatctgtcgctttatcccaggttgcttccagttcgtagtatttcccgactaaagttcgtgtaattactgcatacatataatcatgttcaaccgctaaatgaatcccacgattagtttttgtctcaattctgacttggtaataatcaagctgttgtttgagcgcttttaaatccttattgatagtgccacgactcacagccaatgattctgccaaatcatccagaataacgtaatccgtgatttgctgtaacaattcttttaaaatcgttgcttgtcgctttgagggatcattgaaatctaaatcctttttcaaaaaattagtttgtagcttagccatggcagaataattattgataactaggtaaaacttggcttgattaacgttgatttttgcaatacccaccaaataatcattgattgcacgaatattcttggtaattgtgactctcgaaacagaaaaatgggattgtaattctcttagtgtcaatgcatcattattaataaaaaagtttaatatttcaaaactttgcctatccattgcctcaccatgcccccaactaaaatttaaaggttaaccacgactcttgcctcccgcaacgttaatcgtaaccccggtaatgtaactggcacgttctgatagtaaatagttaactgcatccgcaacttctgatagtttgccactccgaccaagaggtgtggttgacgtactcttatagcctgcccgaatgtcatcaacagttttatgccgggtataagctaacgcctcttcataagagcgtgttcttagcccagtagcttccataatacctggcgcgacaccaacgacccgaatattatgttcacctaattctttagcccacgaacgagtgaacccattaatcgctcccttagttgctgaataaacactctgtccttgtgaaccttcaagtccagcttctgaggacatattaacaataacaccgtactgttgcttctcgaattgatgggtaactgcctgcgatacaaggaagacgcttttcacgttcacggcaaacattttcgcaaaatccgattctgcaaattcatacttaccgtgaggatccttggcgtcagccaataaacgtggcaaattgataccagcattatttacaagcccgtcaatttttccttgttcatcaacaacctttaagaccagccgattaaccgcttccgcatctgtgacattggtttcaacaaagtgtaaattatcattttgctgatcaccttgattgaggtcagcattataaacaatcgccccgttattcaataattcagttacaattgctttaccaataccggatgagcccccagtaacaacgtataccttacccgaaatattaatccatgaattattcatcaaaatcgctccttaatcatttcttttcttcacagataaatatatacgaaagcgcatacattattaatgcactcttttttcattggctttttaaattaatggactaatgattcatcaaacatttagatgtctgatataaactataaatattatgccgaattattttcattatcgccatatcataaagcaaattttgtaatcgaccattgtaatcaataaccgtaaaaatagagtcgctttaaagaagcgtataactccttcaaagcgactctattaaatagtcttatagccatattaatttgttttaaatcgtcaccgtaacagctgctgccgcaataattagtatcagtccaccaatcgtgacccacatttctttggtagtcttcttttggcctaagaaccaaataccggttaacgttgccaatacaacggaggtttgtgaaagaataaagccggttgctaatccgttcatatttggttgcgcagagattaagtaagtcaacgccgcaaacgcgaagaagaaacctgagatgatgtgcgtgtatgacaccccttcaacgagggctaacttttcacctcgtgatgctaagaacagggcatatacgatcgaaacaataaccatcccaattgcttggggaacgaaggcttcctccccaccaatattggttgcttggggcgcagccgaataagcccagtacccgatttcaccaactgctaaccagataacagcttggcgtaaggtccgggcgttacctgcatccttatgttcagaccacactgttagccaggcaccaatgataattccaactaaggctaggccacccaagaccttgtccattgccccaggccagtcacctaaggcgaagacgccccacagtgatgcgcccaacagctggaaggccgtcgtaattggcattgctcgtgaagaaccaaccatcgtaaacactttaaatgtcacgatttgggcacttgcccaaccgatccctgatagaattgaaaaccagagattcatgccgcttggaaaagcaatcccttgcacccatgcataaatcagcgcaaagattaacgttccaatagttgaacccaagatctgattaacaggccgaccaccaattttcgacgcaatcgtggggtaaagtccccaaccaagtaacggccctaagccaattagtaaagcggtagtattcattccaatccctccattaatcaccaactactttaaaaagtaacgccactttccaatagaatatttgaataaggtgtcatttcaccagtccgaacaaaggccttgcagtcagccaagtccttcttcatttcttcatgtggaatgaaggtaattggggtgtctggtaagcgcttcttgatggccgtcaacatcttaggattttgaactttaatttcttctgccaaatagattcgttgtacttcaagctcttccaagacgttattcaagacttgcataaaactaggaataccattatcaacggctaaatcgattttttcggttgaacttggtactggcatgccagcatcaccaatactcaacttatcgaaatggcccatcgttgcaataactcgtgacaaatctgaattaataacttttgtttttttcataattatttaccctccgcggctgtaatttcatttttataaggaattgatggttgcgcaccgaaacgttgtacggcaatcgatgacgcccggttaccatagcgaatcgcatcttcaagattactaaaatctttatttaacacactactcatcgcgccaataaacgtatctccggctgaagtcgtatccacggcttcgactttaaaagctggtacgataccatgtcgcccatcgatatcataaaacgcacccttactaccaatcgtaatgataacagctgaaataccgagggcgtgtaatgcagcggacgcctttaacatgctgacttcatcggtgattgcaatcccagtcaaagtttccgtttccgtctcatttggtacaatcatgtcagtaactgctaaaagttcagcggggactttttccatggctggagcgggattcaagattgttcttacgccagcggcctgtgcaattttaaaggcttcgaccgtactatcgacagcgctttcaaattgtgcaaccacaaaatcactagtttcaatgatatcacggtgggcttcaacgtctgctggcgtaaaggccatgttggcaccaccatgaatcataatttggttttcaccggcatcatcaaccgtgacgtaagcttgacctgtcgattgattagtcatctttgtgatccctgccaagttgatcttttcctgcgtcaataaatcaagcatggttttaccagcagcatcgtcaccaaccgcaccaataaagtgggtattagcaccagaacgttgcgctgcgacggcctggttcgcgcccttaccaccaccggctgaaaagatttccttagtgtgaatcgtttcgccaggctttggcatgttttcaacccgaatcgtccggtctaagttgatactcccaataacggttaccgtattcataatggtccctccaaatagttaaattaatctgaatttagtttttattaaaacgttttatgaaaacgttttaataactcgtaaaaaatataacacatctgaataattaattcaaatgtgccgtcgaatttctttcaattaatttaactggtaagtggtgttcttcccatggctgctgcggattagcaatacggtcgagtaactggttggctgtcgtttgccccaactcaaaaatcggttgtgcgatggttgtaagctgtggcgcgacatattggcacatttcgacatcgtcatagccaatgacactgtaatcatccggtatccgcttatcatgttcagccatgcctaagtatacaccgaatgcgatttcgtcattgactgcaaagatccccgtaaccccagtcgccaaaatttccggaacaacttggcgaccacccactttagaaagcggcgtcgcgatgacatgtaccgctgtccgcggatacacactataaaaaccactaagccgcttttggacattggctgacggttttgctggaataagaacggcgacttgtcggtgtcccaaatcttttaagtgttgagcagcttgccgccccccatcatagtcatcagtcaacacagaatcactgaacccttcggcgcgcttttggtctaagacgataaatgggtgacccttttgccgtagaatatcattaatcgcattattggaaacggccgaacttgcgataataaagccatccacaccccggcggctgagttcatccaaatagacgcgttctttgtcttcatccagatcagcattacacaacatcgtgatgaaattttgctgatacaagacattttcaatgcctcgaagtagctcaccaaaaaagggattccggatatcaggcacaaggaccccaattgttttgctggtcttcttaatcatccgctgagcaaagtaatcgggctcataatttaattcatcccgggccgcttccaccttagcaaccgtcgccgcactaaacttatcaccatgcccgtttaaaatttgtgacacggtcgcaattgagcgttctgcaaggcgcgcaacatctttgattgtgactgccttatttttcatgggcttctcctccgtaaaattaactcttgcattattgtagcctagaacgccgaattttcctaaccgaatctcaaaaatatttagtacacctataagtatatctatatagtgtgcaagccgataatttatccatatcaagtcttcattttctcctcctctgaaaacaaacagtaaaaactttccaggtagttattctaaaaccacatgacaaaaaagcccgcgctcatcatgagcgcgggctcccttaattcacaaagggctatttttcagtaccttggccgtcccattcacgttcaataatcgcctttaattcactgattaaaggttcgcgtgggttagcggtcgtgcattggtcttcataggccagttcggctaattcgtcgacggtggcgtcaaagtgcttcttttcgacccggttagctttcaaggataaggtcacatccattgagtgagccaagtcaatgtaagctttaactaagctttctttgagttcttcgtcggtcttgcctggtaaccctaaggcccgggcaatgttggcatagtcggctaaggcagtattatggttgtacttcggccacattgctaacttcgttgggatttcagcattgtaacgaacgacttgcggataagtgatcgcaattgccaatccgtgtggtaagttgaattccccgcctaatttatgggcgatcgagtggttgatacccaagaaggcattggcaaaggccatcccagctaacgttgaggcattgtgcatcttctcacgagccatcttgtcaccatcataagaagctttcaagtacttgaaggctaattgcaaggcttgaattgaccagccgcgtgtgaagtcagaagccatcgttgaaacatatgcttcggttgcgtgggtaattacgtcgagaccagtccaagccgtcgtccgctttggcaccgtttcaacaaattgtgggtcaacgatcgcaatatctggttgcattgcgtagtccgtaatcgggtatttgacgtgcgtcttggagtccgtaataaccgcgtatggcgttacttcagaaccagtcccagaagtcgttggaatcccaatataagttactttttcggatactggtactttgtacgtccgcttccggatatccaggaacttctgtttagcacctaagaaggaagcttctgggtgttcatagaagagccacatccccttagcggcgtccattgcagaaccaccaccgagtgcaatgattgtatctggcttaaaggccttcatccgggcaacccctttgtagactgtgtcagtcgacgggttcggttcaacttctgagaagatgtcgatatcaaccggatcagtccgcttgttcaagaccgccgttactcgatcagcatagccaaattcaaccatcccaggatcacaaactaggaaaaccttcttaatcccggccatgtgttccaagtagcgaacggaattgcgttcgaagtagactttgggaggcattttgacccattgcatgttattacgccgttttgccacagttttgatattaatcagatccatatctgtaacgttatgagaaatcgagttgccaccatatgatcccgtgcccagagttaatgaaggcgccatgttattgtagatgttacctaacccaccaactgaagatggcgtgttaactaagatccggcaagctggcatttgtaagccaaattctttgaccaatgcatcatcggtcgtatgaatcccagcagtatggcctaagccaccatagtgaagtaattcattagcccgtttgaacgccgcttcatgcgaatccgctttgtaaacggtcagaactggtgataatttttcgccggataatgggtacttgataccgacaccattaatctccgcaatcaagacccggcagtccttagcgacatctttcaagccagccatttgtgcgatttgataagctgttttaccagcaactggaccacgaactgtgtgccggttaggatcaatgacagcatcactcaaggcttgcacatctttaggtttaacgtagtagcaacccaaacgaataaattcagctttaacttcagcataaatttccttgtcgataatggcactattttcagaagcacaaatcatcccattatcaaacgtcttcgataaaacaatgtcgttaaccgcctgcttaatgtcagctgttttttcaacataagttgggccgttaccaggaccaacacccagtgctggtttacctgatgagtaagcggctgtcaccatacttggaccaccggtagccaagatcgtcgcaacatccgtatggtgcatcaaggcgtcggttgcttcaatgcttgggtgttcgatgtataaaacagcatcagctggaccaccagcagctttaatcgcttcccgcatcacatcagcagccgcagaactacatttctgagcttgaggatggaaaccaaagacgatcgtgttacgcccctttaatgagatcaacgtcttgaaaaccgttgttgaagttggattcgttacgggtgtaaccccggctacgataccaactggttcagcaatttccattagttgctcttcatcgtcttctttaatgacgccgactgtcttatcatggcgcatgctgttccagatatattcgctggcgtagatgttcttaatcgccttatcttcaacaacaccccgaccggtttcctcaaccgccaacttggctaacttcatatgattgtccagtgcggcaaccgcaaccttttcacataaatcatcgatttgtgcttgggtatatgacttcaaaatagctaatgctttcttagaacgttgaactaattgatcaacttcgtcagtaactttgcttgtttgatttttttctgtcttaatcatgaagtgcttcctccgttcaattcctttgtgaattaatttacaaactttattatagccatccttgctcataatgcaacaagaatttgaaaaattatttaatatcatccaaacagtacacttataaactcatgtttagcagtatttatagccaataaaaaaattcaattgttaagttcattaatgaacaatagcagtcaaaaacaaccgcaagctcctcattagccatgatgagcttgcggttgttaaaatttcatcagcttggatcttaatccctgtcccgagtcttgattaccgaacaacgataactgaaataggtgcttttcgggccaaacgcggaccaattgccccagcaatcttagaatgtggaaattcagtatcggcaccggtcactaatagatctggtttaaattctggaataacttgctctaaaatgacgtcatccacatcaccgccttcatagacaagcggctctacttgattaacgcctcgttgttctgcaagctgaacatactcagcaacaacatcttcaacgtgtttccgtttagcttggatcttcgacggtgttaatgaatcaaagatattgatatcttcgctttccagcaccgaacaaattcctaacggaacatcatagtcgtgggccaaagtcgttgcgtatcgaaacgcacgttctgaagaggtattatcgtcctcatcaacggtcagtaaaattcgccgatagacaagtggctcttgcattttttgattttccatagttaatctcctcattgaagtgaattgatattgaccactgccattataccagtttcagaattcaaacggcaccatttctcacacgcatataatcataagctgatttccttcaaacgccgctctaaataattaagggtagcttttaacgctatgattccagccaccagttagagcggcagcattctccccattactccggtaaggctttcaacgtctgcttcaaccaattcacatagtagtcttctcgtccgatcgcatgttgtaagatcaaatagtgaccataatgttgcttagcagctttagcttgcgggaaaacggtcgccaatcgctgttgtaagtgtgctaacttagctgtgtgcagggtgagctgttcctgtaacatcgctagtaggcgtggatcacgatccgtttgaataaagtatagttttaaaataaattcatctttcgtagcggttaagtctggtgtaccgacactgatccactcatgtaacagctgccgaccagttgcggtgatgtggtagagtttcttttcaagtttttcgccactgaccgtaatttcatgcgtgacgtaaccttgttcttctagtcgcttcaattgcggataaatttgactatgttgagcttgccagaattcaccgatctcgtcatcaaaggctttagttagatcatagcccgttaatggttgctggtttaataaccctagaataataaattgtaacttgtttttttgcgccattggaaattcctccttgacgattccttgataacagtatacactaaccttgttgtttaaaacatgtaataaattacatgattaaaatgacatattagacataaggaaggtaattctaatgacaaaaacttttaaaacacttgatgactttctcggcacacactttatctacacttatgataacggctgggaatacgagtggtacgccaagaacgaccacaccgttgattaccgaatccacggtgggatggttgccggtcgttgggtcactgatcaaaaagctgacatcgtcatgttgaccgaaggcatttacaaaatttcttggactgaaccaactgggactgacgttgcactagacttcatgcccaatgagaagaaactacacggtacgattttcttcccaaagtgggttgaagaacaccctgaaattacggtcacttaccaaaacgaacacatcgatttaatggaacagtctcgtgaaaagtatgccacttatccaaaactagttgtacccgaatttgccaatattacttacatgggcgacgccggccaaaacaacgaagatgtaatcagtgaagcaccttacaaagaaatgccgaatgatattcgcaacggcaagtactttgatcaaaactaccatcgtctaaataagtaatgtttcacgtgaaacattctggtctacaaattggataattatcagtctgtccaatctttgaaaattactaatcatctgaaaaacattcatttagcaacacttcaaaaaggccttcataaatgtcatgacatttatgaaggcctttttcgtaattattttacttaggcttccgttacatccagtgcgacctgtcccagcccggcatcgaagtcggcttgccagtgccccgcggtcaaatgtggtggtaggacaaacgtccccgacgaaactcgttgaccagccgttaatgtcttaccttgctctgcaagcttgccgactaaccacttcaatgactcaagcgggttacccaacacttcactcgcttgaccagttttaaccgtctccccatcatggactagcgtacactttggcgttgccactgcatcagctgaagcgaataactcggcagtctcccgttcagttccatataccactagcccaccgactgcggcatccgcgaccaccaaatttttaggcaaatcgggaaaccagtcagcaaaacgtgaatctggcaattcaagtcccggcgcgacagtcgttttttgccataaatcggtcaatgaatcggtggttgacagggcttctttagccttaaagaccaactcaacttcgacgagtgggtccattagttgcccgcgtcgaaccgtggttggtgccgccaaaaagtgatctgcaacctgggcaccgtacagcggcgtatgagcatcaaacatcttttgagtttctgcactcgtcaacgagaccttgtatccaccaaccggctgctgttttaaggccgttaatgcggcttgaactcgatacgcagcgtcttcgtcagcgacactacttgtaagatcagccattgttaacgcatgctgtgtctgataggccgtaaatagctgttgtgcaacttgagtttctgtttctgtggtggtagttgtcattataaaacctccattatgtgtttgtggttactgttatcccaatatgtgttcgtaatgaggccgtctaatcattgctaatacgttaactcattacaattaatctagttgtcacttcattatttggatgtattcagtgcgccagctaattgtacgggcgtcttaaatacgaattattaagactacgggtcataaatatcgttcatgttaaaactatgtgtgtctaaacgtataaattgcacgttgctaaaactatgtgttaatcgatacacgtggtatcgtatgtgatctacccggagtactcagttatactatgtgtttttgattccttgttgacctatgtgttactcgaggagcaagtcctcgtgcgactagttaccattgcccacatttgttggtaactagccacctgaatgtccgattccatactcctcaccacctttaaatcataaaaaaacgtcctttaactaactcctatgagttaattaaaggacgtccagaacgggttaccacctttattcgcgactacttcacaatagtcaccttagtacgtacagcaattgcgatacgccggtacattaatgggtaccatccagcaccatctccacgaatttcgaggcgcaactccaaggtgatctatgttaagtggtattgactgccttacaccaatccgcagctcgctaactaaccagcttagcaccgttccttatcacggtttttaatctaaatttaattaatgattagattctagcgccagattatcacaatgtcaaccttaaaattaaaaataaattagattaattaagcttgcgttcattggccataacatccactaatgccacgtactgctcagtatgcgtatcacgcaacgtataatttggtgggagcgcgtccgcatctgctttgacaattcgaaaccctacttgcgcataaaatcgcagggcattttcgttggccatcacacacttcaacgtgagtggttcggttgcatactggcgcatttctgtcagtagccgctcaccaactttcaagtggcggaaatctggggccacaaaaagcagatgaatgaagttggccagccggtacaacgaacaaaagccagcccgctgaccatcaatccacgcgaccagcacgaattcaccacggctgtcttcgttaaaatcttgcagttgtggatcagtgacccatggaaaatcttgctgacggtccactaaatatatttcagccagcgctgcttgatccgcagctgttgccggttttatctcaattcgtttggtcatcctgtgccctcccccatttaatgattctcattatgacgttagttgttgagaatttcaaacattaatcgccttaatctattcatcaaagctagctttcaactactgacaagcgttataatgttaggcaatactttcaccaaatgaaagcgggggaaaaatgaaaaccgcaattgtaacggatagcgcaagctacctctcagcggccgatgttgaaaagtatcatattcacgtcgtcccaattactgttatttttggtcaccaaacctacttagaaaacgtcgaaataacgtccaaagaattttatgaacgaatgcgtaccgcgcctgagttaccaacgaccactcagattacccttggtcagatgcaaacgacttatgatcagctggcaaaggcgggctatgatgctgtcattagtatccatctttcttctggtatcaccagctttattactaatctcgaaagttacctgccaaacgtaaccaacatcaaggtttatccgtttgattcactaattacggctggtggagaagcttacatggtcttgttagctgctaaattagtcgctgaaggatactcacccgaacaagttattgctcagctcaaaaaaatccgtgaaacaaccggcgtatattttgttgtcgataatctcagtcacttggttcggactggtcggctctcaaacgcttctggactcgttggcaacctcttacgcattaaacccgttctgacctttcaagatggcaagatcgtcgctattcaaaaagaacgaacgatgcggcgggcatacgcagccatcaaagccaagctagctgctgagattgctgccgttgactatccacttcgcgtcacaatcgaaaacggcaacaatccgaaactccaagccgaatggacagctgacttgaaggctagctttcctgatctcaccatcgatgaaggcgagatcggtcccgtcgttggggttcacgttggagaaggcgtcatgggactgatttgggcgcgtgactgggaaaaatggaccatttagttcaccattatcaacccctaatcattcatcatgacagtcaaaaacaacttttgttcctcacgacgagctgaggagcaaaagttgttttttgcattgccttatttccgtttcttgccttttttctttttcttgttctttttccgctttgtgttgggctgttcggccgacttagtcaacaacttccgtgcctttttgatcaacttagatcgttgtttggtatccagctgttcccacaatgttattaattcggggtcaacggcaggggttggcgtgaccgatactggaatcggtaccgcttccggggccaccgctgttgcaacatcagtcgtacctagcagccaatctggcgacacattcagtaccgtcgctaacgccgtaaccttatcatgtttagccacgtatttattacttaaccactggctgattgatgaacgaccaattcccgtttgtttagataactgagcagaggttatgttcgcttgttgcatcgcttcttttaatcgttctgaaaatattcccatcacattaccctcctagtgcaacggatcccatgcgggtagccgctgtgcacgttcgttaagcagcgcctgaaattccggtgccaagaaatgcttgtgaacaactacttcatagacgtactcattaaaccaatcttggctcattacgaagtagccttgatcacctacttgctcaccccaactattttcgaccttccacttagttggcgtatcagccactaagtcaacgccggttaacgtcatggcatggctaacttcaccttcacctgttaacagccgttgcgccttagtcagatgatcgttggttccaaataacttgccagtttcaaataaatgagcatccaagtatcccgtcttccggtccatctgtcgcaacacatcgttgccaaaccaaaccgtttcgccagcctgtaactgttgcacagcaacgtccgtcagcacacccatatcaaggttcaaaaattcgataggcttaccaccaatcacgttatcctcgtctggcaagctataaagtcgattaaacggcttatctggtgaattagtaacgaccacgtaatcatccagatcagtttcaaagtagtcctgatagaattgctgaggcgttaaattagccgtacgatggtactgttgctcatcatcacgatattctaaatcaaagctagttggtggttcaccaaatgagtacgccgtcatccgatagaccgtttgcaacattgatttctccagtgattgtagctcggcctcgcttgcaccatccatcacgagttgccgaagttttaacccatctttacgaagctgccgtgataaactggcttgaaatgccgtcgtattatcagtgttgaaggactctggcatcacactagctggaacgacgccatacttttgaaccaagctggccgccatcgcccactgaccaccatcttcgcccggattagcaaataagaactgaacaagccggtcatcaatcggctgacgcgccgtttgttcaacattccgataaaaaatattagccctttcaatcttatcccagaaaaacaaatagttttgtgataactcaaagtctttgacgtgataccgggtcgcaaacttatgccggagcgtgtttaataatgaaaactcccagcaacgaccgctgtgcttctgattactgaccttacccgttggtacttcaacagaaaaagtccgtgctaagcgactcgcagcttgattatcaaaacttgcagcctcaatcccattcttcgtaatcgctcgcgtcaatactggtgccattcgatcctgcgcatgcgttgtccgtaaagcggcaagtgcatccggtgttagttcagttgccatatttaccagcctccatcgtgatacttgccattattctaggcttattgaccattaaattcaatttagatgctaccttttgtttgcttttctgaacaacattagtcactttaaccatcccacgttgttctccctgtaaagaatgactaaccaacttagttcccccctaccattcagttggtgagcatacaaaaaaagcgcgctcactaacgagtcgcgctggctgctattcagtaactaattgaattaatattatggcgcttagttttattcgagtcccaaaatggcactttgaccacgcccaataccttattggctgggacaaatccccagtaacgactatcatttgacactgaccgatgatcacctaacacaaagtacgaatgcttagggaccttagttgttttcagattccaactgtaacggttctccagcgtactcaaatcccaatttgtcgttccctgcgtccgctcatactgactgatgaacttctgcgggacaagcttgccattgacatagagtcggccgtcttcagatttaactgtatcaccgggcattccgatcactcgtttgacatatttgaccgtcttggagcgtgcgtctggatcaacttgataggcgttaaaaacgatgacactgaggtgctgaatcttagctgtcttgaccacggcgacgcgctcattgtcatctaagttaggttccattgacggtccatccacccgaaccatcgtaaaaataaagtgcctgatcaccatggcgacgagtaaccccactacaattggtagtacccagctcataatactcttaaaagttttcatcaaacgttctcccttaccccgctataacttccaatcattatagtccaatcaactcagcttgtctggtattggtgaatcgtttttacaaatttataagtaaccttgcaacgatatcacactaaaatgaccgccaaaacaatcttgacggtcattcataatttccttaatgactaactaacacatcttgatgacatctttcttccactcatcaagattgtggtgtatcttgcaaactccaattgatctttccatgataggatcctgcatacaattcgggctgaacatcgagaaaaataccttgtcgcgcttgccaggttgctgcaatatttgtagtttgttgattaggatttgtatgtgtgccatggcctaccaacgtttcctgattggtcatcacatgtttttgaccagcagcatcaatatagaccaaatccccaattaatgagtgttgagcagacttcattttagttgcggtggcatacacataccactttgaagcaactgatcgcgtatcatgaacctcaatttgccactgatttgtgggcgataataagcgctcgctttgtggaatcgtgttactccgaaaacgcatttgagcattgatttgaccaaacatgagtcctgaatttacattaactgttaacgtatcaatattagatcgttggccgtgttgatctgacacccacactttcacatcattaggcccttgtttaagcgattcagtgggtaatttcagatgaaaataccccgccttatctggctcattcaccgaaccattagccttataattagcgatgggcgttccatcagcatgggcaaagtggatggttagtgcgttattttttaaaacaacatcgcgatcaaaatcattctgatcagtccccaagatcattccggtcactaataccttgcgtcccttagcggttgaaaaggtatgaccattagttaaaaacaagttgagcttaatcgtcgcatccgttcgtggagttccgttattaatcaccgtttcagtgtgccctggaatatcatcatacgcatttgtttccgttaccatcaagtgaccattaccgctaaagcatttcatctgccagcgcccctcatgatcgactcgtgtttttttgatctgattaccaaatttagccgtgattagatcaccaccttgtgtgcccgtcccggtaatgatgcgcttattagcctcaaatccagtaatatgtggtgataatttaatctgactaaccatttgacagtactgcttcgttaccatgtaagcaggcagtgttcgaatgggattactgctcgcattagtactgctcttattaccaatccaaaccggctgacctgctttgattccatgcgtcttgatagtatctgttcgatgcggtcgccaaactcgattattgatattataagccaggaaagttacaccatactctttgccttggcgattcaaaaccagatcccataaattatataatcccttaccattcggcgaatgtactacacctttccctaaagtaattttcactcgactagtcttgtgcgtcatgtgaccatctcgcacataattagccgcaatgtgtgtaatgggccatggcactcgaccaattgttcgttgttcgaaattagttgtaatatcctgcatcgcactggtcggctcatcgacaacctttgcctgcccattaacagccatgaggcaaactaccaataacagcccacccacgaccaacgtgccagtaagtaaccttctcacttctacggtccctccttacctagcaatagctttctttattaaaccaacggataaccatcaataatatcagtagcacgctaccgaaactcgcataaaaccaggttaagagctgctcatcagtctgtggcaattgataatacccctttggtcttgtcaacgtcttttctgtcaccacacgatatggcctggtcccattaggaatcttaacgttgcgattatctatctgttgctgagttctctgaccagcataaaagctaacggtgactgttgaccgccccccaacggccgcaactcccgttattgttaacattattaaactgattaaaatggttgctacacacacgctaaaccgttgcaccatcctacccccattaattaacctaatccttcgaccgccgttgtcgccgccatagccagacgattacgcctaaccctaaccccagtactagcattgaaattgcgccaattccaattagcatccacatactaacccccttattatcaattgactcatgattatatttttgagctgctgtcatactaatatgaaaatctcgtttaaatcgccaatgatgacgctgattattaaccgtcatttgtaactgataatcacccggttgtaattgttgtgatcctaatggcattggtgctttaaaaactgtgtttggcgccatcatgacacccgttttcgtattcttaataatgaccttttgatgccgcttattaataatcaccgttcggatttttaaattcggaatgattcttgcgacaggattacgtagcgcaacaataatgcttcgatgataattgttcaagccagctttcaccggccctagacacaaattaggaattggcaattttcctgaagataatttcaacccaataacatacgaatactcattcttaacgttgatacttttctccgttactcctgttaccttgtcatcaacccgtttaaaataccatccacccaacaagacgccatttactggctgcttaggtaacttcaccttgattgcgaccgttttggagccttcagccggaatcgttattgtccgctcaccctgaattgtggctaaatcactgactcggtattttaacgactgatcgtacgatttggccggattaatatattcaatcgtcccattagtattcgtatacgcggtatgaatagccgttcgaaccttaatatccttattagtgacattgtaaatgactgtccgtaacgtctgctgttgaccgcttgccattttcaaatcaaaaaaagaattttgtttatgaatctgattttttggtatctcagcggcaacactaaaaccgacattgttgttgtggaccgattgttgccgattagccgacactcctgtctgtccgattaaaatactaaatccaagactcacacccattagtcttatgaattggataaccactttcaatctcaacacaccccatattatgacgcatcttttaaagctatcatttaataaaagggaagccactgctcgcgattacatcaacgattactttatccataataaccgttagccatcgccatctgctttagcttcccctcttggttatattctaactaacttgctggtgtatcactcaaactccagttcaaagttgtttggtacccctgcgctttagccgtgtttgccggcaccgttaacttaacattacttggatcaatttgatcaacagttacaccagcaccatgatctttcgctgccgataatactgtcgccgaattaccatctaacacattaagagcctcagtggactgcacgccattattagttgcaccagaattagttaccgtaccttttggtagctgaagcgttgcccctttcattacagaaccgtctgtaccagtcaaactactcccggcaacggccagtgtccaaccagcattacttcctcggacatcagatacttctgtgactgcttttttgttccataagcctgataaatccgaatcagtttctgcggcagtgtacgtttctggatttaaaacatcgatctcatggcttccaaaatctaatttattagaaacgtagatcagcgataagccgccaccggctttagcaccgttaccactatcaccgctattatcaggcttattgggattatccggattaactggtgataccggactactatttcctttaaacatcgcctgaatatcagtcgtaccagtcgtattggccgtactatctgcgttgggagcagcgggcgtatctgcctgagcgatgacacccgaactcactaataaactacttgccactaaaataccactgactaacttactaactcttaccaacaataactccccctttattttgtaaacactgtaaacaatgtttactagttctgaagtataataccttaatttaatttagtcatcattaattaaagtgttgttgtttttttaatgaaacgtgtactaattaaaaagtaagctcactaaaaaagcacaattccaagttggaattgtgctttatcgttaaaaatattaattttttctttcatcattcgttaatatcaactgaacacaccagtcataacctactactgatgattattgaactttagcgattcgcccctgttgaatataaacactcagaattgcaatatccgcgggattaaccccactgatccgtgaagcttgtgcaatcgttgtcggctgaatcttctttagcttctgatgagcctcagtcgctaatccgtcgatcgcatcataatcgatccgatccggaatctttttagcttccatcttcttcaaccgatcaacacgttcctctgctttttggatataaccggcatacttgatctgaatttcaacttgctcaataacatgccgttctagtggttcgggtgctgccgggataaatttcattaaatcagcatattgtacctctggccgctttaagaaatctgccgccaacacaccatccttaagctcaccagaattatgagcacgtaagaaagcattgacctcatcattaggcttgattctgattttgcctaaacggtcaagttcattcttaattgcttggcgtttcgcctcaaatgccgcataccgttcatcatcaatcaatcctaactcgcggcccttatccgttaaccgcaaatcagcattatcatgccgtaagatcaaccggtattcagcccgactcgttagtaaccgatagggttcattggtgcctttggtaactaagtcatcaatcatgactccaatataagcatcactacgcttcaaagtgaattgaccacgatcaagggctcgcaaaccagcgttgataccggcaattaatccttgcccagcggcttcttcatacccagaagtcccattcgtttgaccagcagtatagagattcttgaccaactttgtttccaaggttgcctttaactggtaaggcgccaccacgtcgtattcgatggcataacctgggcgcatcatttcagcatcttcaagacccttaatggaatgtaaaatccgctgttgaacttcttccggcatcgacgttgaaaggccctgaacataccattcatccgtattacggccttctggttccaagaataattggtgccgcttcttatcagcgaatcgcacgatcttatcttcgatcgatgggcagtaccgtggtccgaccccttcaatcacgcctgtaaacattggtgctcgatcaagattttcacgaatgatcttatgagtcgtctcattcgtataagttaaccagcaagataattgatgctttagatcaatgtagtcagcatccttcgtttcaaaactaaaatgatgtggttcaggatcaccaggttgttcttccgtaacactgtagtcgatcgtattaccatcgactcgtggtggtgtaccggtcttaaaccgttccaagttaaatccaagtcgttccagatcaccagataacttcatcgctggttgcgaattatttggacccgaagaatacattagttcaccaatgataatcttgccacgagccgccgtcccagtcgtcaaaacgacactcttggcactatagcgcgctcccgtattcgtgataacgcccttgcagaccccatcttcaacaattaagccatcgacaattccttgccgtaacgtcagattcggttcccgttcaatcgtgtgtttcatttccgcatggtaagcatgcttatcagcttgggcccgtaaagctcgaacagctgggcctttacccgtattaagcatccgcatctgaacgtaagtcttatcaatgttacggcccatttcaccgcccaaagcatcaatctcacggacgacaattcctttagccggaccaccaaccgatggattacatggcataaaggccaccatgtctaggttgatcgtcattaagagtgtccggttacccattcgggcagcggccaatgctgcttcagaaccggcatgaccagcaccaacgacgataacatcatagtcgcggcctgggtactgctttacttctgtcattccaatttcctcctaccactacttacccagacagaactgactaaatagctggtctaataattcatcttcatagctatccccggtaatttgaccgagaaattcccagcaacgggtcatatcgatttgaaccaaatcaactggcataccagccgcaagtcccgtttgaacatcttgcaacgcttgtttggcttgattcaacaaaccgatgtgacgcgcattggtcaccatcacgttattttgactactttcgataccttcattgaagaacatcttggcaatccgttgttcaagttgcgtgacgccactttgttccaagactgacatacttaaaacgtcactcaaatcgactagttgcgccaattcagcttgatcaagacgggctggtagatcagtcttattcaagataacgattcgttttgactggtcagtctcttgcaacaactctcggtcttcagccgtcaacggttggctattatccaacactaataagactaaatcggcggccccgattgctttgcgacttcgctcgaccccaatcttttcgaccttatcttcagtgtcccgaattcctgccgtatcgacgagtttcaatggcactccacgaacattgacgtattcttcaatcacatcgcgggtcgtcccggcaacatccgtcacaatagctttgtcttcatgcaaaaggtggttaagcagactagatttaccgacattgggacgcccaatgatcgccgttgccaaaccttcgcgtaagaccttaccttgcttagccgtcgctaacagttgattaatgctttgggcgacctcggtagccttctccttcagcatcttggtggtcattgtttcaaccgcgtcatactctggataatcaatattgacctctacttgggctaatacgtccaaaatatcttgccgtaaatgtcgaatcagcttagatagatcaccatctaattggtttaacgcgaccttcatggacttatccgtcttagcacgaatcagatccataactgcttccgcctgtgacaagtccagccgaccattcaagaatgcccgcttggtaaattcaccgggttccgccattcgcgcaccgtgactcaagatcaattgtaaaatttcattagttgccacgagtcccccgtgacagttgatttcaaccacgtcttcacgcgtataggttttaggcgcgcgcattacggtcgccatgacttcgtcgacttcctgatgggtatcaggatcaacaatatgtccatagttgattgtgtgtgattgcactcgactgagatctttacccttaaaaatctgggtcaccacgttaaacgtttggtccccactaatccgaataattgaaataccaccctcaccaggcggcgttgaaattgccgcgatcgtgtcaaattctgtggtcgttggcataccatcatgtcctttcttgtcagcgtttcatcgcctaataccataccaaatttacttacaattagttaataatatgtcctaaaatgcagaaaaaaagcgcctagtccacgccaccttaaagcgtggataaagcactttgactactttatctaaaagataagaatgattaacacctactataatagctcacccggagtttgtcaaacgcctgtttgcgttactttgaataaactatttgcgaatcgccacaaccacggcccggtgcggatcgcggccttctgagaatgtggttacatggtgattattcgctagttcagcgtgaattaatttccgttcaaacgatggcatcgggtccaagaaaacttgtttgcccgttgcaatcacttctcgagccgtactctcggctaaccgcttaagtgtcgcagcccggcgctcccgataatcatccacatctagcaccacgttaacgtgtgacgcaccatgatgattcatataaacttgcgccaaatcttgcagtgcattgatcgttcgaccgtgtttgccaatcagcaaaccctgcttagttgtatcgaaattcaatgtcgcatagcggttgccgaagtcgacgtcaagatccgccgtgacacctagttctttgaccaccgcaagcaagtaatcacacaacgcccgcaccgcggtctcgttagctgcttggcgcgctgcaatttctgcgggtgtccgcggcgtctggctctggtcagcagccactgatttggtcttactagtggtcgctggtttagattggtcggtatcagcgataaccgggccggtggtaaccgccattgaagcgggtttagccactgctttcgccttgctagtcgctggttttgcggcactggtcgtggcctgactagttttagcttgtctggtcggcgttgactttggtgtccgcacggtaggccgcggcatggtcggtgctgtcgttgattcagtagctactgactgttgcgctgtcgccgtagcggaagttggcgtcgttgcaggtgctgcggaggctggcaccaccgttagccgtacttgggcggggtgtttgcctagccccagaaatcctttttttgcttcagcgatcacttcaacttcaacttgatcgcgtgttcggtgcagttgttttagaccagccgcgattgcggccgcgacggtattaccttcaaatactgtcatgcttgaatcctcctcgttaaaaatcctgctttcattatagcattaccattcgccatgcgaacacctgagtatgaacacttaatgaacccttacaacgattaggacttcggccgttctactacccctgaaaactcagactagcaaaatctagtgcttattatgtcaataaccaacctgttcatggcgcgtttcagagacgcggcccacagcctccctttgccgtatttactaattgccactcgcgagccgtatcaaagctgctctaaactcaataaaaccgattttcccgtccgtaatgactagaaaatcggtttataatgctagtatttttagccgactaattcacggcatctgacctactgattggccactaaatcaaaccactatcaaattcaagccagaaccagcccacctgtcagtacactaactggtcatatgacgaatcaagactacccacacttagccctgattctcaataagacggactacccgacctgccgtacaggaacttgctcatcaacaccggccgttttagccgcttgatgaacttgaatgccatgttggaaaacatccttatcttgctgaataacccgaatatcttcgattggattggcggtcattgcaataaaatctgcaaatttaccagcagaaatcgtcccgtattcatccgcaacatgcatcgcacgggcacagttgattgtggccgtatcgatggcttgtgcgggagtcatgcccgccttatcgacatagagctgcatttcgtatgctgattcatcctcaaagccattataaggcgttccagcatccgtccccatcgcgatgggaatgccagccgccgcggctttagtgatacttgcaaaatgcttcttgatgttgacgattaccttttcacgcgcccatgctggaacggtcttctcgccatatttataaatagcatacatcgcgttcatcgttggtacgatcacagtgccatgttgccgcatcatctcaattgtttcatcatcaatatcaaaggcgtgttcgacagtatcgacgccggcttgaaccgcctcttttactccggcattcccctgcgcgtgagccgccaccgtcttgcctttatgatgggcctcagcaacggctgcttgaacttcttcaaaattaaactgaatatcatctggggtctcgccgtttcgaagtaccccaccggtaaccatcatcttgatattatcgacgcccattttaagggcctggcgaacaccttgaacgaccgcatccacaccatcgacttcgtggccgccatccgcaccatgaccacccgtaattgaaaaggcctggccagatgtcatcacgcgaggacccgcaatctttccttctcgttgcatctttgaaatcgcaacgtcaatatcatactgggcgccaacattgcgaatataggttaccccatggtttaccatatcttgcatattgtgaatcgcatacatggtattatactcacgtgactccggatggcggtcttcctggccgtcatgccaccagtaagttggaatactggtaatatgtgtatgggcattcatgatgcccggcataacatactttccttgcatgtctgtcgtttgttcatcaatcgtatccggggttcctgtaccgaccgcgatgatttttccggttgcgtcgtcaacagtcatgaattgattatcgataaaagtttgcttttctgaactgtagattgaggcattgatatagttggttttggtcataataatgacttcctttcattttggcaggtcgcacaccgttcattaacggtaacggaccatcattttcatcactgcattgttggttctctaactgactattcaccacgcctcaccacctttcatgacaagtttttatttccaataagcatattgaagttgactggacgttccagaaaattcatcccattgcaagccaccaacatccttgctgaccaaaaatgcagaagaggcttggtaagtgggaatcacggcatcgagtttcatcaaccggcgatcagcttgcttttcataagtccaccgttgcgcggccgtgtatttcgccgtattagataccttggccatcaacgcatcgtacttcgcatctttccactgagtaaagttgatgctattcgagctctgcatcccatccaaaaagttttgggcatccggataatccggcccccaaccgactgtgacgaggtcaaagttccccgtaaaatcacgtgatacatgggtcgcgtgtggaaccgcaacgatcttgatcgtcacgcctttcaaatacttttcggccacgccctggacgtattcagcgagtttcttctcagtatccgtatcgtcgcatagaaaattcaaagtcacattttgcttgccgagttccttttgggccttctgccaatactgcttagcttgcttgatattagtcggtgataagttcccaacttccttaacaaaatcctcaccagtagtcggatcactcgcgtagtttttcggaacaatgttcgtcgcggcttgcgagccgtcttgcaagacatcttttgctagtgttttttgattaatgaccaggcttagcgcgtgccggaaattctcattggcagttacggacttcttactattgaaataaatgtaattattccggccagttttagtgaccgtcatttgactattattggcattattcttcacgtactgccccgaaatgttggtcacttggaccgttccggcgttgaagaggttctgcgccgtattatcatccttagtgaccgtgactttgatgcgcttgatcttaacgttcttggcattccagtagtacttattcttaacgtaataccaactatcattagagcctttccagcccttaataacgtaggcaccgttcgctaccgtcgtcgctgagttactccctaacttagacccgtatttctggactgccgccgtattgagtgggtaaaagctcgtaaactcataattcatataaggcaccggcttgctcaacttgatggaaaacgttcgcttattaatagccgtcacacctaatttattaacggccatttttcctttattaacggcatcaaagttcttgatgtaactaatggcatccaagttttgagacttcgttgttggattagcttgccgccgcaacgccgtcacgaaatcttgtgaagtgatcttggttccattttgccagcgtgcatttttgcgaatcgtaaacgtataccgggtcttgttttcagtaggcttgaccttcttctcgactacccccgcaacaatcttattattcgcgtttttgcggtaaatcccttcaccagtctgtgtaattacggcaccgccgttggtttcgatcgaagtcgttggatcagtcgtcatcggttcgccaggaatcgtgatgcctaacgtcctattttgatcagccgtactggtcgttttcgaagaattagagaccgcccccaagcagccggttaataataaggcgctcaccacccctataatgctatatgtatactttgcttgcatctctaatccctccattatgttttgattttaatcagatcaaccggcatcccgcaaaacaaaaagacgccctactaagctgttatgcttaaaaggacgtcttcacgcggtaccacctcatttgcgagccagtcagactcaccacttacatacggccaaatttattgacgatatgttggtacgttatcgggtacacccggaaattgcttcacgcaacttctcactagtaatcgacttttagctaccagttcagatcgcttttcatcatccgcgactcgctgtaactgactgataaccgactcctcgactgccgttcgcttaatctaattattttttaatgtgattcacatcttagcggtcatttttcaatttgtcaaatctttttttggaactttttcatgcgccgggtcattacgtttttaatcgcccgttctaattacgactgataaagtagctctctcaaaccgcggcacgctattaaaaacatgtgatcaaatggtgcagacaattatttttataggcaccttgatccccggatgattactattaccagtatttgatcgttcattacaatttcctcatcacggaccgtccaggggccttacataaacgcacattagcatcctgccatcacagtccaaatcatattgaccgattggtaaaaatgatacagagccaacaaaaaagacccaccacacatggcaggtctacttgtatttaacgtttatgattacgaatcgcgcgctttctagctttttcaagcgttcgtttacgatcacgttcagcttgcttcttagcttcccgttcgcgattaatcttgaatgggttttgtaataacaaggtttgaccaacttggaacgcgttggaaatcacccagtacaaggacaacgctgatggcacgttaatggccgtaatcaaaataatcacaggcatcaaatacgtcattgacgttgtcatcccgttttgttctggctgcgacttcatcgctaaccaggaactagcaaacgtaaagatcgccgctagaattggcaaaacgtagtacggatccttgctacctaattgcaaccataagaacgaaccggtcttcaaggcttgtgtccgccagattgcttggtacaacgcaatcaaaataggcaactgaactagtaatggcaacatgctggccattggatgcacaccatgcttggcatacaacttcttcatttccgcttggagcttttgctgagtttccatatcgcgtgacgaatacttcttttgcaaagccttcatctgcggttggacttcttgcatggctaccatgttgcgggtttggaagatcatcaatggcaagataatgatccggatgatcaacgtaaagacgatgatcccgagaccataactatgaccaaacaagtttgataaccaaataatcgcccgtgagaagttcaagatgattaagccatcccaaaacccggtgctcttatccgtgattggggtattactacacccactcaaaactagtacgatcgctagtacggccagcattgccagtatttttctgtactttttcaaacgaatgtcctcactttaatcattgtccagcaggtgcgctagctttagcgcatggcttagataagctttggtttcggcttgcgacttaccagcaacggttggtcgggcaatgacgagaaagtctgcatcttgcttaagctgcggctttagctcggtgattgattgccgaatccggcgtttgacccagttacgcgcaacggcgttcccgatcttcttaccgaccgaaataccgacgcggaaatggggttgccccggtttttccaaaacgtaaatgacaaattgacgattggcatacgagttgcgggtctcaaaaacttgttggaactcagtttctttttttacccgatatgattttcgcataatccatctccatgtgtgcgctcaagctcttgagcgaattgctacacaactttacagccctaaacaccaggtctaggactgtaaagaaaaagccactgattatcagtggcctatgcagacaatacttttctgcctcgttggcgtcgacgggctaacactttacggccattgctggtgctcatccgtttgcggaaaccatgtacacgttgacgatggcgcttctttggttggtaagttctcttcatcatgacacctccttctccataatgacatgaatcaattcgattaagtcgttattttcaaaacgcagtttacatctaaacgcatttcctgactactatagcatatttttatttgtttgaaaaccagtaaattaaatttctccgtagtaattcgaggtcaaaaaattatttaattgcgaatttatttgtggattatagcaaagtgactttccgttattcgcaatttacccacaagtttttcgacaaattaacgggttgttatttagttatccacagggcgtatttgttgtgtgtataactccgataaacgcttttattgcggctttagttttaaactcgtttttgtggataagtgctgttttataaaattcattcctagttttcgacaagctgtgtatattcaaatcccagcctgtgaattctcttaactttaacttgtccacttgtggaaaactctatatgttcatgctaaaatagaattacgttttttaagaaaaggggtatccac

SEQ ID NO: 11 - DNA, 9480 bp, Lactobacillus plantarum
  source 1..9480: mol_type = genomic DNA
aaccagctagtatttaatccaccggccaagggtgcccaacttgatgaagaataggaaaattgtctataaaattgggtaacaagttgttcagcaggtgttgaagagctttcaccgctgatataactatatgcctggtcttctacttgttgcagttgggtaaagaaagcagcgttaggatttatattaactttggtaactttagaaactccgttatctttaccagagacagcaacttgatccatatcaatccctgttgaagctccagtaaattcattgaattgatcaaagctccaattttcaggcattttgaaccctaaatttccgctccatccagaagacatatcagcaacaaaactatacttaactaagtggtttacatgcaagcacgcattgcgtgttccataaatacctgctttatattcagttgatcctataataccagtaataccctcgaaataggggacaaccgtactactcatgtttccatcttgaatatcaacatcaacggcaaaatagataactgtcccacttggtaggccaagctgacgtgcagtattaacggcaatagaagcgtctgcgaaaccttgcttgctattaaaataactttcttcataacctccatcttcgtaaatcggaaaaatcttaaggttagcatctaatagcagtttaacttcagtgttagtcaaatttttatctcgtttatcagcaccagtcccgacgcttcctgtcaaataacggccgataatgttatagccagctgctttcagtgatttagccgtagcagctgatgtgatttgagtagccatgtcgacaccatctgaagatcggttagtgttaccattactagttaataagcctttgatcacagttaggtcagcagttgaagtataaggaggcaacttcatgaattttctaaaggaaactataccgtcggcaacattttgtgtaaattggccattgaaggcgcctgaatagaaaccattaacgtaaagaccatattgaataattttaacgattgccccagttgcgccagaattaacagttggtgttttattgatcgtaccaggaccataataaccattagcagttccagtatccataccttccactgactgcaaagcataaatcaaagcagtgttcgtatccctttgataaattccatcacatggtaaaataccagtgtaagcttgataatcatgattaagctgttgttgcattgaacggattttagcgtccccaccaggaactaaaacaaacgcgctcattgtcaacaaggctttcataatatccgagtttacattggcgctggtgtctttgataccggcgtctttttttaattcaacgacagcagcagccgtgttagtagtaaattctccggtaaagtcttcagggttgatacccttacaccaaaagccaccttggattattttaacaacattgtgcttaaagccagttttaactttattagcaaattgagtatcccatttagcggcagttgaagggccaaaattatcaactagatctgtgatacctaattcgtgttgcagggctctagttaacccataaactgtgttccaaccagtattaccgtcctcgggtactttaccaaagccagaaactttaccgtaagttttgttgagccagacttgtgtttcttttaccatttcatccatacataaatcgtcctttctgtgttgtttagcaaccataagcgcctacaacgaacaagctatcaaatgagtaagcagtttctgattcaacctccttaaaaattatttgctcaatattcgaacacacgttcgagtagacggcttaattttagcacagaaaaacaagaaaacaaatttttgtcggattattttcgaacaaaaaagatcttccaggaaaatgggaagatcaagtaagctatatatttttaagggcccatttttaccaaatagccccttgaaaacattgttaaaataacccccaatatctataatgtagatattgggggttattctttgtttttatcaataaataacatctgctttttagaaaaattgttggacctttgtactaattgaactaatttcttgccgagataaagtggacacaacttcgccatctgatcgttttgttggatcgacagcacggacatgttgcaataacgctgtcccgtgaattttcccgttatctatcctgataaataacggcgatttagcatacttttcttgggtacgatatttgtcagaggtactgattggcacaactagcaccgtattaaaatagcgattatagtgatcgttgcttacaactaaacacggtcgctttttcttagtttcagtgcctttagccggatctaaattaatccataaaatagcgccttgttttaatttcattaatcaaagtcttcgctttccacatctttaccccaatcaacttctgttgtactgagatttccaaactttttttcttgttcatcaacaagttgccatagatccggtttactacgaacaatcattactttaccatttggttcaatctgccattcaattgtatcagtagaccgaacctttaacagttcacgtactgttttaggaattgtaatctgatttttacttgtgatctttgagctaaccttagttacattacctgcactcacaatatcatctccttactttttccttacaaaaaataataacataactgctttaatatctcaagaaaaggagaaaagactatgcaacaagttgtcctacccatcaaagattcaaatgttctcaaagaagttcaagatacgttactcaataattttaaagctggccgtcgtaactatacaatttttcaagttggtaaagctacgctactaagagtcagtgacgttatgtgcttaaaacagaccaatatttttaatccgaacggttccattaaacaaaatgcgtttattcatgataaaaaaactggtaaacctaataccttgtatcttaaaccggttcaaacagaccttttgttgtatcgtcaatggctgcttgataatcagttacaatctgaatggctctttccttccattcaacaccccgaacgacatatcacagaaaaacagttctacaaaatcatgagcaaagttggcgatcttttaagtattaattaccttggtacccatacgatgcgcaagactggagcttatcgagtttatacgcaatctaattataatattggtttggttatgtacttattaaatcattcaagtgaagcgatgactttagcttatttaggcttggaccaagcaagtaccgaaactatgttagaccaaattgattttggttagaattggttattttttagttgttgccgaaggcaacttctgagacagattttaagcacaaaacctctactaaattttggtggagtgtaagtgcgccttgaccgagccttgaccgagatttgctcagtttgcggactcacatagattttctatgtgtaagtgcgcattgacctcatttcactcggtctgctgataaccatagagtcgattttttccgttgttgaattgaatgtatttttaattaaattatgcttacacttaactaatcttgttatgatttaaatttttgcagagattctttgtaaacttagcaaacacaatactagtcaatacccaatttacaatagtgattcgaaagttacgaacgtcagtgagttactctaggtaagtgctttagcacttactatatataatataaataaaggtaattcacaaaatttacactcacataaacgctcatatatcaacgttatcaagccactaactagcgggataaatatttcatagtcaaacattatctaattctacacgtttaacgccaagcaaccgcacgtcatagcacaccgtatatccccactaaaacgacttctaagagactttgaactatgtcacgtgtatttttttataccttgatatgctaaaacgtcttaaatcgtattttaaaacaggctcgtcaaattaatgacgggcctgtttgtatgatggaattttcacactattatgaagtagatgtgtcattatgtcggagacacaagcttgattatagcactatgcaaacttggtgtaaaaataaaaaagtgaacacccgggtaagtgctcactaagaagttgtcacttcgaaacggaataccatgagtcccgactaatgggacaactctattttagatcattctaattaaatcgcaatattaaaaagcgactacctaaacagatagccgctcccccaagtaatatagatagcacatattattataataacattaaaattgacatagtaaaaaggcctatccagttaagggtagacctttttattttgcggtatgttactgaaagtagtgtgcaatgtcatgtcatacagcacaaacgtagtatagcattattaacgctagttgcaaccactagagtcagttttcattatagcactattttatgctagttaacataacacatagtattaaaagctaaagtttgtgaagtgtgtaaatccttgttatatcaacgatagcaagctatatatttaccgatatcatacgataacgatactttgtgaaaatagagtaaatttgtaaatgttaatataccagtattttacatttgtgaaagtttattattctacgtatgtaagttactttgtgataatgacgtttcatgtataattgtccgaaacatgtcggcttagaacccgcctaggctgagactatataatattaatagtgtgtctatcgttagtagttagttcttaacgttttgtggtctacgtgacgattagtacattaataacaccctagtttaacctatctgcacgcaaccacgtgctcttaaccctcaaggtcaaaccagtttagtgcgcttgccctttgctgttcagaacgcttgaacctgagcgggatatagttttccccttgttttgcgaagaagaaaactttttgttgttcgtcacgaatcaccgtcacgtaaaaacacttgtattgttactattgcgcttgtagattagcctaactaatttagcctataaaaaaagcaccctttataggtgccagcaatcatttatttttagttgtttggatcactggccttgcgtaatagccctgtactttcgtactgctttaccgcccgccccgtgcgtggggccaccgttcggaaccaacctaaatacaagtataggttaattcctagtgggagtttatagcggcggctctcacttgacctgtcgacttgtttcattagctccgctaaccggctgtcagtcctcgaaaggtaagattagttggcttggctagaatgttgccactctagtaacgaggcttggctcccccgtgatccagaaaaattcaactctacctacttgaaaaatcttacaatagtaggtagaatgaacacataaccttgaatgatttacgtgttcccccggcttagcccccgagggaatttttttgtctatttaatttagttacaaacagtattatacccctttgccgataatatgacaaaggggtatttttaacgtctcagccagccgaataagccctttttaggcgtcttagtttctttcccctcataattaccctcggtaggttttaaaacgtctgtatcgtcgttttgcagaggcctatcgtcctgtgaaggggtgttgttcgtagtggtatcgagtagcttttcattttgacggttggtagacaagttgagttgttgttgctggtcaagtaatgactgcattttatctaattgatcgttctttcgttcaagttcgcccttcaaaatgtctatttgttcaagcaatattcgtgacgtatctgctttcgtttcagttgcaaggtgaacggattcacttgaaaacgcctttataataacgtctttagtgtgttcggaatatagtttcgcgtttcctttcattgaacgttctgaaatgttattatcacgaatgtaccgccacactttagttttgttaacctttgcaatatcagctatttcagatattttatataatcgttcattgttgttcatgaatcgttctcctaacgtttttgaatgttcactatgatagattataccatttcaacactgaacgagggcttagaacacgtctctcaacatatgatataattctatcgtggagagttttagttttaaggtagattgtaaaattaatccgaacgctgttcggacaaaaaagatcagcttcctttaaaatggtgtttaccacaaacccatcttttaggagctgatcttttgtctagtataacctattccgaacgaattaaaatcgaaaccttttgtgaactagggctgtccaatatccaaatgggcgttcggattaattttaaaatctaccataagtctaccgattttttaatattattttattcatcaatttccggcgccgacccaagctctgcctgaatcatccagattttcttctcaattgcggttttgagaccaatgaaaatatcttgggtactgaagtctttttcaacatcggatacttcaatgccgtgttggtaaaggtcttccaagtaacgatagccatcaactaggtgtgcgaggcgttctggggttgttttgtcccattcaccaggccagtcttgaatcttagtgttttcgaccatttcttttaaggtcgagtaaggactgccatcaagcgcaatcagccgttcagaaatgacatcgagttggctgtcaatttcttccatgaactcatccatcaaagggtgcaacttcaaaaagttgggtccacgcatgtaccaatgcgtctgatggataatcattgacatctggctcaaatcggcaacgagttgatttaatactgctttggttttcgtatatttcattagattgatctcctttcgatatggttattataacttagtggtagcttaatctgaaacgttatacactggcaaattaagttatttatagcccgtagaattaagtcgttttgaaaagatggagacgttatatggtagattgtaaaattaaataaatctacaattgaattttatttaccttatgaagatgttcaaaacgcgttaaaggaaagtgcgcaaaacccctttatacgtacaaaggatgaatgggtagtgggtaacaatgagtgtaaattaaataaggcacaaaaaaggatgcttaaggataaagaaatatataatcatttcaatctagaaaatatttccagttccatcaaaacggagctaaacaagatagtgcatgacatcgatgactaatactttaacaccaaacagaaaggggctatgaataaatagggtctatactagataatggaccctatttattgaaatgggagagtaattttttcaaagaaaagggggtaaaaactatgattaaaaaaggcattacaagagtaataataaaagtaatgaattcttggagttcaattttttcaacgttaccagggtaacttttgggaatcggaattaaaaagtcgaggaagattggtaaatatacaatgctattaactattacaacactacttattccgattacgtaatgaaccatagaaaaagttaggacttgattgtgtctgaagtattttttttgagcctgctgtacagtttttttcctagttacaatgtcatgccttgcagcgttgaataggagtgaaaagcctattaatgcaacaattattaatataaagccgaatgaattggtaactccaacttctgaagtgaaatttagaaaaaaagggcccaaatatttggagatgaaccaactagataaaattgaaataataattgtaagaatgtttttaaaatagccattttcaatgatagtatcatttatatggtcacataaatataaaaaatcaattgttatgagaaaaaaaacaactaatattacgattaaccatgagtacaaggctgatttagcacctctttctattttttagataaaagtaaaaaactaaaataagtaaaatgataaactaatatatatagtttatcattttgcttattactttctatgcgttttgttcaattaacttgcgaaaagctttagcggcgtcttttgcttcactgtcagtataagaatctgtttaaaatctttttaagagtaatatcaagaaagcgagaatgatcatttggcgacttgaattaaggtgccgctcacaatttttccagagccgacgacatttatctaaccaactgaaagaacgctcaataatccagcgttgtggtaacacttcaaatttatgtagctcattgcgtttagccacctgtacggtggcttttaaattggattgaacagtggcggcgaagttgtccccggtgtacccaccatcaacaagaactgatttaacttgttgtaaatgttcacagtttagcgctagcatggcactagccccatcacggtcagaaacattggcagtagtgatatggattgcttgtggcaaaccgttaatatcaacagctaagtgacgttttattccagatattcgtttaccaccgtcgtaaccatgatgcttggcggtatcagtatttttaacactttgggcgtcaattattataaaagatgttttagccgagcgtgactgtttttcccgtagggtaaagacaatttttttaagcattgatccaaaatagaaggttcatcaaggacttgttcttcagaccatactcgataataataataaaccgattgccaacgaggaaaatcaactggtaactgccgccactgacagccggtttttaaaacataggccaccgcgcaaaataagtcgtaaagatcatatttccgtggtctggttgactgtcgtgcaccttctaaaatgggacggactagttcaaattgtcggcgagaaatattactgggataattcattactgatcaccttttttgaactatcataccaaattagctagattttaaacaggttctaagaaggatatttttgtaatttaaactttttaaaagccaataaagcggttttataagctgcaccccatgaacctgtaccaccttttaaaagagtatatgtgtcgttctgtagtgaatcaaggtcatcatcaaaacgattacttaggtaagaattaaagcgaacggagctttcattaccggtgtaataagttttaataattttggatatagtttggttgttttgcgaatggattgtactgtaaacgttaagtgcatccaaatcgtcaaccaaatcttcccttccaaattgccctttattacctacatatgcagtaattgattcataaaaagagccgtattttttctggttaagatgagcatcttctatacttgttaaaagatctccacaccagcccccaaggtcctgaattcctgaggctgactgtggttctccccaaaataaaagtgcgtttaaagaagccatcatgtgtggtaagccaatttttatgccagtagtactatcataaagagtttcgaagtcactttcttttgaaacatgtaatgctgagtttgcgaatgct
